(19) United States
(12) Patent Application Publication
(10) Pub. No.: US 2003/0114399 A1
(43) Pub. Date: Jun. 19, 2003

(54) Human and mouse choline transporter cDNA

(76) Inventors: Randy D. Blakely, Brentwood, TN (US); Subramaniam Apparsundaram, Lexington, KY (US); Shawn Ferguson, Nashville, TN (US)

Correspondence Address: Priya D. Subramony, FULBRIGHT & JAWORSKI L.L.P., SUITE 2400, 600 CONGRESS AVENUE, AUSTIN, TX, 78701, US

(21) Appl. No.: 09/911,077

(22) Filed: Jul. 23, 2001

(51) Int. Cl. A61K 48/00; C12P 21/02; C12N 5/06; C07K 14/47; C07H 21/04

(52) U.S. Cl. 514/44; 424/93.2; 435/69.1; 435/320.1; 435/325; 530/350; 536/23.5

(57) ABSTRACT

Human high affinity choline transporter (CHT) cDNA was cloned from spinal cord and the primary structure and chromosomal localization have been determined. Mouse high affinity CHT cDNA was also cloned and characterized. An isolated polynucleotide, an isolated polypeptide, a recombinant host cell, a recombinant vector, a purified protein, an antibody, a nucleic acid detection kit, a method for screening cholinergic therapeutics, a method of treating a patient, a method of gene therapy and transgenic CHT mice are discussed.

[0001] The government may own rights in the present invention pursuant to grant number ROI MH58921 from The National Institutes of Health and National Institute of Health Training Grant HL 07323.

### BACKGROUND OF THE INVENTION

[0002] I. Field of the Invention

[0003] The present invention relates generally to the fields of pharmacology. More particularly, it provides cDNA encoding novel high affinity choline transporters, methods for their use in screening and therapy.

[0004] II. Description of Related Art

[0005] The molecular mechanisms involved in neurotransmission in the central nervous system is a multi-step process involving the release of neurotransmitter from the presynaptic terminal, diffusion across the synaptic cleft, and binding to receptors resulting in an alteration in the electrical properties of the postsynaptic neuron. For most neurotransmitters, transmission is terminated by the rapid uptake of neurotransmitter by specific, high-affinity transporters located in the presynaptic terminal and/or surrounding glial cells (Kanner et al. 1987). Since inhibition of uptake by pharmacologic agents increases the levels of neurotransmitter in the synapse, and enhances synaptic transmission, neurotransmitter transporters provide important targets for therapeutic intervention. (U.S. Pat. No. 5,658,786).

[0006] In the central and peripheral nervous system, cholinergic neurons regulate a variety of autonomic, cognitive and motor functions (Fibiger, 1991). Dysfunction of cholinergic signaling has been implicated in Alzheimer's disease (Coyle et al., 1983), Parkinson's disease Calabresi et al., 2000), schizophrenia (Tandon, 1999), Huntington's disease (Lange et al., 1992) and dysautonomia (Baron et al., 1996).

[0007] Okuda et al. (2000) have identified and characterized a high-affinity choline transporter in the rat. However, using human gene products in drug development offers significant advantages over those of other species, which may not exhibit the same pharmacological profiles as human genes. Reagents developed to interfere or modulate the rat transporter may not be as clinically relevant as reagents developed using a human system. Also, since no cell lines exist which express the human choline transporter, lack of crossreactivity must be validated using less ideal tissue, for example, postmortem brain tissue. Okuda et al. (2000) provides no sequence relationship between rat and human choline transporters. Also, the Okuda's proposed topology for rat choline transporters is distinct from the topology as described herein. Okuda et al. proposes 12 transmembrane domains for rat and C. elegans choline transporters. However, human (Apparsundaram et al. 2000) and mouse (Apparsundaram et al., 2001 in press) choline transporters were not described, and these transporters have a distinct protein topology (13 transmembrane domains) based on the sequence relationship of cDNAs to related Na+/glucose family of transporters.

[0008] To facilitate a human-target based approach to drug design, a human ortholog of CHT has been cloned. A mouse ortholog of CHT also has been cloned. These genes will be beneficial in drug screening and animal modeling of cholinergic function.

### SUMMARY OF THE INVENTION

[0009] The present invention contemplates an isolated polynucleotide, an isolated polypeptide, a recombinant host cell, a recombinant vector, a purified protein, an antibody, a nucleic acid detection kit, a method for screening cholinergic therapeutics, a method of treating a patient, a method of gene therapy and transgenic CHT mice.

[0010] An isolated polynucleotide encoding a polypeptide comprising the amino sequence essentially as set forth in SEQ ID NO: 2 and of SEQ ID NO: 4 are claimed. Another aspect of the current invention comprises the polynucleotide of the nucleic acid sequence essentially as set forth in SEQ ID NO: 1 and SEQ ID NO: 3. The polynucleotide may be operatively linked to a promoter such as a tissue-specific promoter. It is an aspect of the invention that the polynucleotide is a cDNA segment. The polynucleotide may be comprised in a vector such as one selected from the group consisting of a retroviral vector, an adenoviral vector, and adeno-associated viral vector, a lentivirus vector, a vaccinia viral vector, and a herpesviral vector. The polynucleotide may also comprise a pharmaceutically acceptable formulation.

[0011] Another aspect of the current invention comprises a recombinant host cell comprising a DNA segment encoding an isolated human choline transporter. The DNA segment encoding a polypeptide may have the amino acid sequence essentially as set forth in SEQ ID NO:2. It is preferred that the host cell is a human cell.

[0012] Yet another aspect of the current invention comprise a recombinant vector comprising a DNA segment encoding a human choline transporter polypeptide under the control of a promoter. The recombinant vector preferably enhances cholinergic signaling.

[0013] Another aspect of the current invention comprises a purified and isolated polynucleotide wherein the polynucleotide comprises a sequence identical or complementary to between 14 and 100 contiguous nucleotides of SEQ ID NO:1. The polynucleotide may comprises at least 14, 20, 30, 40, 50, 60, 70, 80, 90, 100 contiguous nucleotides of SEQ ID NO:1. The polynucleotide may also comprises 150, 200, 300, 400, 500, 600, 700, 800, 900, 1000, 1100, 1200, 1300, 1400, 1500, 1600, 1700 or more contiguous nucleotides of SEQ ID NO: 1. The polynucleotide may be complementary to at least 14, 20, 30, 40, 50, 60, 70, 80, 90, 100 contiguous nucleotides of SEQ ID NO: 1. The polynucleotide may also be complementary to at least 150, 200, 300, 400, 500, 600, 700, 800, 900, 1000, 1100, 1200, 1300, 1400, 1500, 1600, 1700 or more contiguous nucleotides of SEQ ID NO:1. Also contemplated is a purified peptide comprising at least 10 contiguous amino acids of SEQ ID NO:2. The peptide may comprises at least 20, 30, 40, 50, 60, 70, 80, 90, 100, 200, 300, 400, 500 or up to 580 contiguous nucleotides of SEQ ID NO: 2.

[0014] It is an aspect of the current invention that the peptide is sensitive to hemicholinium-3. The peptide may be mutated relative to the wild-type hCHT protein, and may modulate high-affinity choline uptake. The peptide may bind to an antibody specific to the polypeptide comprising at least 10 contiguous amino acids of SEQ ID NO:2 encoded by human cDNA.

[0015] Another aspect of the invention comprises a method of using a DNA segment that encodes an isolated human choline transporter protein, comprising the steps of: (a) preparing a recombinant vector in which a human choline transporter encoding said DNA segment is positioned under the control of a promoter; (b) introducing said recombinant vector into a host cell; (c) culturing said host cell under conditions effective to allow expression of the encoded protein or peptide; and (d) collecting said expressed protein or peptide.

[0016] Yet another aspect of the invention comprises an isolated polynucleotide encoding a polypeptide comprising the amino sequence essentially set fourth in SEQ ID NO: 4. The polynucleotide may comprise the nucleic acid sequence essentially as set forth in SEQ ID NO:3 and optionally may be operatively linked to a promoter. The polynucleotide may be a cDNA segment and may be comprised in a vector.

[0017] Another aspect of the invention comprises a recombinant host cell comprising a DNA segment encoding an isolated choline transporter having the amino acid sequence essentially as set forth in SEQ ID NO:4. The recombinant vector may comprise a DNA segment encoding a mouse choline transporter polypeptide under the control of a promoter.

[0018] Yet another aspect of the invention comprises a purified and isolated polynucleotide wherein the polynucleotide comprises a sequence identical or complementary to between 10 and 100 contiguous nucleotides of SEQ ID NO:3.

[0019] In still yet another embodiment, there is provided a purified peptide comprising at least 10 contiguous amino acids of SEQ ID NO:4. The peptide may bind to an antibody specific to the polypeptide comprising at least 10 contiguous amino acids of SEQ ID NO:4 encoded by mouse cDNA.

[0020] Another aspect of the invention comprises an antibody that immunologically binds to a protein or peptide encoded by a contiguous sequence from the nucleic acid sequence essentially as set forth in SEQ ID NO:1.

[0021] Anther aspect comprises an antibody that immunologically binds to a CHT protein or peptide that includes a contiguous amino acid sequence from SEQ ID NO:2. The antibody is a polyclonal or a monoclonal antibody and may be operatively attached to a therapeutic agent or a detectable label such as a fluorescent label, a chemiluminescent label, a electroluminescent label, a radiolabel and an enzyme. It is an aspect of the invention that the label be a green fluorescent protein or a β-galactosidase. The antibody may be adapted to detect losses in cholinergic neurons.

[0022] In still yet another embodiment, there is provided a method of screening for cholinergic therapeutics comprising: (a) obtaining a candidate substance; (b) obtaining a recombinant cell comprising a polynucleotide encoding a choline transporter (CHT) polypeptide and a promoter heterologous to the polypeptide coding region, wherein said promoter directs expression of said CHT polypeptide; (c) combining candidate substance with said cell; and (d) determining whether said candidate substance modulates high-affinity choline uptake. The CHT is preferably a human choline transporter (hCHT) or a mouse choline transporter (mCHT), and the cell is preferably a human cell, a mouse cell or an invertebrate cell. The candidate substance may be combined with the cell in vitro or in vivo. The candidate substance may be an acetylcholine receptor therapeutic, an antibody such as the 15 C terminus amino acids of SEQ ID NO: 2 (SEQ ID NO: 25), a gene probe; it may be selected from a small molecule library or may have a low affinity against hCHT.

[0023] It is provided that the method of determining may comprise detecting a label such as hemicholinium-3 operatively attached to said polypeptide, Western Blot analysis, using a choline transport assay such as a [³H] choline transport assay using COS-7 cells, using in situ hybridization, PCR, gene chip analysis or a negative screen. The candidate substance may be screened specificity for acetylcholine receptor-directed agents such as nicotinic or muscarinic acetylcholine receptor-directed agents.

[0024] It is also an aspect of the current invention that mutations to the hCHT gene are mapped, that cholinergic gene expression is quantitatively evaluated, that the candidate substance is used to probe human cholinergic neurons and that the candidate substance is used to identify cholinergic neurons in a postmortem brain.

[0025] Yet another embodiment of the current invention comprises a method of treating a patient comprising: (a) obtaining a candidate substance; (b) obtaining a recombinant cell comprising a polynucleotide encoding a choline transporter (CHT) polypeptide and a promoter heterologous to the polypeptide coding region, wherein said promoter directs expression of said CHT polypeptide; (c) combining candidate substance with said cell; (d) determining whether said candidate substance modulates high-affinity choline uptake; and (e) delivering said candidate substance in a therapeutic formulation to a patient. An antibody may be used to aid in transport of the candidate substance, such as to the brain of a patient being treated. The antibody may be SEQ ID NO: 25 It is envisioned that a probe is attached to the antibody. This method may be used for treating a neuromuscular, autonomic or central nervous system disorder, including Parkinson's disease, Huntington's disease, Alzheimer's, schizophrenia, dysautonomia or myasthenia gravis. In situ hybridization, PCR or gene chip analysis. A negative screen may also be used. Combining the candidate substance and the cell may occur in vitro or in vivo.

[0026] Yet another aspect of the current invention comprises a nucleic acid detection kit comprising, in suitable container means, an isolated human choline transporter nucleic acid segment and a detection reagent. The detection reagent is preferably a detectable label that is linked to said nucleic acid segment such as hemicholinium-3. The detection kit may also comprise a gene chip or an antibody.

[0027] Another aspect of the current invention comprises a transgenic mouse, wherein the mouse lacks at least one functional mouse choline transporter (mCHT) allele. The mouse may lack two functional mCHT alleles or the gene essentially as set forth in SEQ ID NO: 3.

[0028] Yet another aspect of the current invention comprises a transgenic mouse, wherein the genome of said mouse comprises a choline transporter (CHT) encoding a DNA segment under the control of a heterologous promoter. It is preferred that the mouse expresses more CHT polypeptides when compared to a non-transgenic littermate.

[0029] Another aspect of the current invention comprises a transgenic mouse, wherein at least one mouse choline transporter (mCHT) allele is operably attacted to a detectable label. The label may be selected from the group consisting of a fluorescent label (i.e. a a green fluorescent protein, a red fluourescent protein, or a blue fluorescent protein), a chemiluminescent label, a electroluminescent label, a radiolabel and an enzyme (i.e. β-galactosidase).

[0030] Another aspect of the current invention is a method comprising the step of delivering a polynucleotide encoding a choline transporter (CHT) polypeptide to a cell. The CHT polypeptide may comprise the amino sequence essentially as set forth in SEQ ID NO: 2 This method preferably causes an increase in cholinergic function in said cell. Preferably, the cell is in a patient having Parkinson's disease, Huntington's disease, Alzheimer's, schizophrenia, dysautonomia or myasthenia gravis.

### BRIEF DESCRIPTION OF THE DRAWINGS

[0031] The following drawings form part of the present specification and are included to further demonstrate certain aspects of the present invention The invention may be better understood by reference to one or more of these drawings in combination with the detailed description of specific embodiments presented herein.

[0032] FIG. 1—Schematic representation of the localization of the human choline transporter to chromosome 2. Radiation hybrid mapping localizes hCHT to human chromosome 2q12. This is the first step in the assessment of hCHT as a risk factor in disorders involving altered cholinergic function.

[0033] FIG. 2—Alignment of amino acid sequence of high-affinity choline transporters. Alignment of mCHT with species orthologs was performed using version 1.6.3 of Lasergene software. Abbreviations are as follows: mCHT, murine; hCHT, human; rCHT, rat; CHO-1, Caenorhabtiditis elegans; ChCoT, Limulus polyphemus. Residues matching mCHT sequences are blackened. Residues spanning putative TMDs inferred from hydropathy analysis are represented by line drawn above the sequences.

[0034] FIG. 3—Predicted secondary structure of hCHT. The N-terminal is located on the external side of the membrane. 13 transmembrane domains are proposed with an extracellular NH2 terminus and a cytoplasmic COOH terminus. Black circles represent amino acids conserved with rat, mouse, and C. elegans choline transporters. The C-terminal is located on the internal side of the membrane (Apparsundaram et al., 2000).

[0035] FIG. 4—Predicted hCHT amino acid sequence. Amino acid sequence of the derived from hCHT. The location of 13 TMDs are shown with solid lines above the corresponding amino acid residues. Asterisks indicate potential extracellular N-glycosylation sites.

[0036] FIG. 5—Strategy for the “knockout” of the mouse choline transporter gene. The gene is shown before and after creation of the knockout line. Enhanced GFP (EGFP) is being introduced into the line to allow for regulated GFP production from the endogenous choline transporter promoter. When cut with Eco RV and probed with the 5′ external probe the DNA from a targeted ES cell clone should give: 7 kb wild type allele band size and 5.3 kb targeted allele band size.

[0037] FIG. 6—Northern blot analysis of mCHT. Mouse tissue mRNA, mRNA electrophoresis and Northern transfer and hybridization were carried out as described in “Materials and Methods”. Each lane was loaded with poly A+ enriched RNA isolated from 100μg of total RNA. A single 5 kb species is observed in cholinergic rich brain regions such as spinal cord, brainstem and striatum but not in cerebellum, kidney as well as rat pheochromocytoma PCI2 and human neuroblastoma LA-N-2 cells.

[0038] FIG. 7—Kyte-Doolittle hydrophilicity plot (window=15 amino acids) of hCHT amino acid sequence revealing the presence of 13 hydrophobic regions and a hydrophilic COOH terminal domain. Northern blot analysis of hCHT reveals a 5 kb transcript which is specifically expressed in the putamen, spinal cord, and medulla, cholinergic neuron rich brain regions; probing for α-actin reveals that the lanes are evenly loaded.

[0039] FIG. 8—Northern Blot analysis of mCHT expression. Northern blot of mouse choline transporter mRNA expression in different tissues. GAPDH is used as a positive control for mRNA loading.

[0040] FIG. 9—Western Blotting with affinity purified antibody 97520 reveals a 70 kDa band in cholinergic tissues. The immunizing peptide corresponds to the human, mouse, and rat CHT C-terminus 15 amino acids (SEQ ID NO: 25, VDSSPEGSGTEDNLQ). The kidney was used as a negative control.

[0041] FIGS. 10A-10D—[³H]HC-3 binding sites and [³H]choline uptake are evident following transfection of hCHT1 in COS-7 cells. Binding of [³H] HC-3 in membrane fractions of hCHT transfected COS-7 cells is saturable and has high-affinity. Binding obtained in membrane fractions from pcDNA3 transfected cells were subtracted to define CHT-mediated [³H] HC-3 binding. Insert: Scatchard transformation of CHT-mediated [³H] HC-3 binding (FIG. 10A). Unlabeled HC-3, choline and Ach dose-dependently inhibit [³H] HC-3 binding in membrane fractions of COS-7 cells. Inhibition assays were performed using 10 nM [³H] HC-3. ACh was examined in the presence of 10 μM physostigmine to inhibit cholinesterase activity (FIG. 10B). Uptake of [³H]choline in resealed membrane vesicles derived from transfected COS-7 cells is saturable and has high-affinity for choline. In all assays, [³H] choline uptake determined in the presence of 1μM HC-3 is defined as non-specific uptake. Insert: Eadie-Hofstee-Scatchard transformation of CHT-mediated [³H] choline uptake (FIG. 10C). Unlabeled HC-3, choline and ACh dose-dependently inhibit [³H] HC-3 binding in membrane fractions of COS-7 cells (FIG. 10D). The results in FIGS. 10A-D are presented as mean+/−SEM of triplicate experiments.

[0042] FIGS. 11A-11D—High-affinity choline uptake and hemicholinium-3 binding sites are evident following transient expression of mCHT in COS-7 cells. Resealed membrane vesicles obtained from mCHT transfected COS-7 cells exhibit saturable and high-affinity choline uptake. Insets are Eadie-Hofstee transformations of mCHT-mediated choline uptake in resealed membrane vesicles (FIG. 1A). Unlabeled HC-3, choline and ACh dose-dependently inhibit [³H] choline uptake in resealed membrane vesicles of COS-7 cells (FIG. 11B). Unlabeled HC-3, choline and acetylcholine were co-incubated with labeled HC-3.

[0043] FIG. 12—Image of ChT-ir in striatum and basal ganglia. Immunocytochemistry with anti-peptide CHT antibody reveals staining of cholinergic neurons and terminals in the mouse striatum and basal forebrain

[0044] FIG. 13—Image of ChT-ir in septum. Choline transporter antibodies stain cholinergic neurons and processes in the septal nucleus.

[0045] FIG. 14—Image of ChT-ir fibers in the hippocampus. Choline transporter antibodies reveal cholinergic fibers in the mouse hippocampus

[0046] FIGS. 15A-15B—Image of ChT-ir fibers in the medulla oblongata (FIG. 1SA) and a 3D confocal reconstruction (FIG. 15B). Choline transporter antibodies reveal staining of cholinergic motor neurons in the brainstem. Note the concentration of cholinergic synapses, revealed as dots, decorating cholinergic neurons.

[0047] FIGS. 16—3D focal reconstruction of ChT-ir at the neuromuscular junction of the diaphragm. Choline transporter antibodies stain cholinergic synapses on muscle cell

[0048] FIG. 17—Image of ChT-ir at the neuromuscular junction of the bladder. Choline transporter antibodies stain parasympathetic neuronal terminals on smooth muscle in the bladder.

### DESCRIPTION OF ILLUSTRATIVE EMBODIMENTS

[0049] I. The Present Invention

[0050] The present invention overcomes deficiencies in the art by providing human and mouse high-affinity choline transporters (CHT).

[0051] II. Choline

[0052] Choline, a natural amine, (C₅H₁₅NO₂) is often classed in the vitamin B complex and is a constituent of many other biologically important molecules. Choline is a precursor of a variety of lipids including the neurotransmitter acetylcholine, membrane lipids such as phosphatidylcholine and sphingomyelin, and signaling lipids such as platelet-activating factor and sphingosylphosphorylcholine. Choline is unable to permeate cell membranes and therefore uses a carrier-mediated transport system to cross the membrane barrier. In the central and peripheral nervous system, choline and cholinergic neurons are used to regulate a variety of autonomic, cognitive and motor functions (Fibiger, 1991).

[0053] a. Choline Uptake

[0054] There are multiple low-affinity choline transport pathways which provide choline for metabolic needs and membrane phospholipid synthesis. Cholinergic neurons also have a distinct high-affinity choline uptake (HACU) process that provides choline for the synthesis of acetylcholine (ACh) (Yamamura et al., 1972; Blusztajn, 1998). Selective blockade of HACU by hemicholinium-3 (HC-3) can reduce ACh synthesis and release in vitro and impair cholinergic function in vivo (Murrin et al., 1977; Guyenet et al., 1973). The activity of HACU is also highly regulated by neuronal activity, neurotransmitters and second messengers (Atweh et al., 1975; Simon et al, 1975; Cancela et al, 1995; Vogelsberg, et al., 1997; Breer et al., 1990;Yamada. et al., 1991) and therefore serves as a potential mechanism for the modulation of cholinergic function.

[0055] HACU has been defined in the rat and human brain as a Na⁺/Cl⁻-dependent process with a Km of ˜1 μM for choline (Yamamura et al., 1972; Rylett et al., 1983). Initial attempts to identify HACU at a molecular level led to the isolation and partial purification of membrane proteins of 35 to 90 kDa from Torpedo electromotor nerve terminals, as well as from insect and rat neural tissues (Rylett 1988; Knipper et al., 1989; Knipper et al., 1991; Rylett et al., 1996). Mayser et al. (1992) reported the initial cloning of a choline transporter within this gene family; however, this molecule has since been redesignated as a creatine transporter based on substrate preference and regional distribution (Guimba. et al., 1993; Schloss et al., 1994). More recently, O'Reagan et al. (2000) utilized complementation of choline defiencies in yeast to identify a novel choline transporter, CTL1. However, the distribution, ion-dependence and pharmacology of this transporter differ from that expected for presynaptic HACU.

[0056] A major breakthrough in elucidating the molecular basis of HACU was achieved by Okuda and co-workers (Okuda et al., 2000) who identified a choline transporter (CHO-1) expressed in the cholinergic neurons of the nematode C. elegans. These investigators also identified a rat homologue (rCHT1) and found the expression pattern and functional characteristics of rCHT1 to be consistent with the HACU in the rat brain (Okuda et al., 2000). Using the sequence information of rCHT1 and the information provided by Human Genome Project, a human ortholog hCHT was cloned and hybridizing mRNAs were identified in the human brain. Similarly, mouse CHT was cloned. Transport and antagonist binding studies in COS-7 cells reveal a substrate specificity, ion-dependence and pharmacology consistent with HACU. Finally, an initial gene structure for hCHT and a map of its chromosomal location to chromosome 2q12 is provided (FIG. 1). The alignment of amino acid sequence of rat, human and mouse high-affinity choline transporters is given along with CHO-1 and LChCoT sequences (FIG. 2). The predicted secondary structure of the hCHT protein is shown in FIG. 3 with the antipeptide monoclonal CHT antibody and antipeptide polyclonal CHT antibody regions marked.

[0057] b. Choline Transporters

[0058] The high-affinity choline transporter is responsible for choline transport into cholinergic nerve terminals to provide for acetylcholine biosynthesis. Acetylcholine, a major neurotransmitter in the brain and periphery nervous system, is involved in signaling motor and cognitive function. Altered cholinergic signaling is evident in neuromuscular disorders as well as disruptions of higher cognitive function occurring in Alzheimer's and other disease.

[0059] Previous cDNAs encoding choline transporters (Okuda et al., 2000) are not of human origin and reagents developed to interfere or modulate the transporter are not as clinically relevant. Also, since no cell lines exist which express the human choline transporter, lack of crossreactivity must be validated using, for example, postmortem brain tissue. The choline transporters of the current invention (et al. SEQ ID NO: 2, SEQ ID NO: 4) are more clinically relevant than what is provided by the art.

[0060] Routine membrane preparations enriched in the human or mouse choline transporter which are expressed from stable cell lines can be used for testing for cross-reactivity or for direct product development of choline transporter modulators.

[0061] In cholinergic neurons, choline transported via a high-affinity choline transporter located on the neuronal membrane is rate limiting in acetylcholine biosynthesis and therefore a potential target for modulating cholinergic function. In non-adrenergic neurons, active re-uptake of norepinephrine (NE) into presynaptic sites via a NE transporter located on the neuronal membrane is the primary mechanism responsible for the termination of effects of NE. Importantly, this NE transporter is a target for antidepressants and psychostimulants like cocaine and amphetamine.

[0062] Cholinergic receptors are proteins embedded in the cell membrane that respond to the neurotransmitter acetylcholine. There are two families of cholinergic receptors, the nicotinic and muscarinic receptor families. The response of most autonomic effector cells in peripheral visceral organs is muscarinic, and the response in parasympathetic ganglia, the sympathetic ganglia, and in skeletal muscle, is nicotinic.

[0063] Muscarinic receptors are known to mediate a variety of physiological responses in the central and peripheral nervous systems. The first subtype of muscarinic receptors, M₁ muscarinic receptors are involved in learning and memory function in the brain and are known to regulate gastric acid secretion in the stomach. M₂ receptors are known to regulate acetylcholine release in the central nervous system and control cardiac muscle contraction. M₃ receptors are known to mediate smooth muscle contractions and promotes secretion from exocrine glands. M₄ receptors are believed to be involved in the perception of pain. M₅ receptors are believed to regulate dopaminergic activity in the brain (U.S. Pat. No. 6,096,767). The use of several substituted tetrahydropyrimidine and tetrahydropyridine compositions that bind to and activate muscarinic receptors is disclosed (U.S. Pat. Nos. 5,726,179, 5,618,818, 5,403,845, and 5,175,166). These compounds exhibit agonist activity useful in the treatment of neurological disorders such as Alzheimer's.

[0064] Nicotinic receptors are ligand-gated ion channels, and their activation always causes a rapid increase in cellular permeability to Na+ and K⁺, depolarization, and excitation (U.S. Pat. No. 6,177,451). They are glycoproteins composed of five subunits with the stoichiometry α α β κ δ which are each encoded by a separate gene. The α α β κ δ complex is a functional receptor containing both ligand binding sites and a ligand-gated transmembrane channel. (For a review, see Karlin, et al., 1986 and McCarthy, et al., 1986.) There are two subtypes of nicotinic receptors, the neuromuscular nicotinics, termed N_{M}, and the neuronal or ganglionic nicotinics, termed N_{N}.

[0065] U.S. Pat. No. 6,177,451 discloses epibatidine and synthetic derivatives that are nicotine receptor agonists. Epibatidine is one of three natural alkaloid nicotinic receptor agonist; the other two natural alkaloids include nicotine and lobeline See, Taylor, in Goodman and Gilman's The Pharmacological Basis of Therapeutics, 18th Ed., Gilman et al., eds., Pergamon Press, pp. 166-186 (1990). U.S. Pat. No. 6,136,550 discloses a family of neuronal nicotinic acetylcholine receptors comprised of neuronal agonist and non-agonist binding subunits, and DNA sequences encoding the receptors.

[0066] cDNAs which encode a choline transporter were isolated from rat spinal chord and brainstem by Mayser et al. (1992). The predicted protein has considerable amino acid homology and shares several structural features including twelve putative transmembrane regions with other neurotransmitter transporters. CHOT1 mRNA was found in the brain, cerebellum, spinal cord and, to a lesser extent, in the heart.

[0067] cDNAs which were believed to encode a choline transporter were isolated from rat spinal chord and brainstem by Mayser et al. (1992). The predicted protein which is now recognized as a creatine transporter (Saltarelli et al., 1996) has considerable amino acid homology and shares several structural features including twelve putative transmembrane regions with other neurotransmitter transporters. CHOT1 mRNA was found in the brain, cerebellum, spinal cord and, to a lesser extent, in the heart.

[0068] III. Diseases or Disorders Affected by Cholinergic Signaling

[0069] In the central and peripheral nervous systems, cholinergic neurons regulate a variety of autonomic, cognitive and motor functions (Fibiger, 1991). Agents that modulate the choline transporter can be used to influence cholinergic signaling therapeutically for neuromuscular, autonomic or central nervous system (CNS) disorders. Also, animal models for choline transporter function can be used to better understand and treat disorders that effect the central and peripheral nervous system. Since altered cholinergic function is a feature of various diseases, the discovery of substances that modulate cholinergic transport is invaluable in the development and use of treatments for these diseases. Dysfunction of cholinergic signaling has been implicated in, for example, Alzheimer's disease (Coyle et al., 1983), Parkinson's disease (Calabresi et al., 2000), schizophrenia (Tandon, 1999) Huntington's disease (Lange et al., 1992) dysautonomia (Baron et al., 1996) and myasthenia.

[0070] Acetylcholine is significant in the pharmacotherapy of Parkinson's Disease. A simplistic, but useful, neurochemical model of the function of the basal ganglia suggests that the neostriatum (caudate nucleus and putamen) normally contains balanced inhibitory dopaminergic and excitatory cholinergic components (Duvoisin, 1967). Although cholinergic neurons are not damaged in Parkinson's disease, the decrease in dopaminergic activity results a relative excess of cholinergic influence. Consequently, a strategy for the treatment of Parkinson's Disease is to block cholinergic activity in an attempt to restore the balance of dopaminergic and cholinergic tone in the striatum (U.S. Pat. No. 6,177,451). Candidate substances of the present invention can be used to block cholinergic activity. Also, the combination of dopaminergic agonists and cholinergic antagonists are contemplated.

[0071] The degeneration of cholinergic neurons causes a loss of high-affinity choline uptake activity in Alzheimer's disease (Bierer et al., 1995). This major dementing disorder of the elderly is associated with cholinergic neuronal loss and decreased activity of choline acetyltransferase. Therefore, it is an aspect of this invention that modulators of choline transporter function be used to treat Alzheimer's disease.

[0072] Myasthenia gravis (MG) is the most common primary disorder of neuromuscular transmission. The usual cause is an acquired immunological abnormality, but some cases result from genetic abnormalities at the neuromuscular junction. The abnormalities in myasthenia gravis arises from a loss of cholinergic signaling at the neuromuscular junction. Mutations in the choline acetyltransferase gene have been found in myasthenic syndromes and these syndromes are likely places therefore where human choline transporter mutations are found.

[0073] As acetylcholine is the principal neurotransmitter at all preganglionic sympathetic and parasympathetic synapses and also at all postganglionic parasynpathetic synapses, defecits in the choline transporter may be present with autonomic phenotypes and the manipulation of these transporters pharmacology could be helpful in many autonomic diseases (e.g. heart, bladder, stomach).

[0074] IV. Proteinaceous Compositions

[0075] In certain embodiments, the present invention concerns novel compositions or methods comprising at least one proteinaceous molecule. The proteinaceous molecule may be a CHT or more preferably an hCHT or mCHT inhibitor, or a delivery agent. The proteinaceous molecule may also be a mutated hCHT or mCHT. The proteinaceous molecule may also be used, for example, as an hCHT or hCHT inhibitor, in a pharmaceutical composition for the delivery of a therapeutic agent or as part of a screening assay in the determination of hCHT or mCHT inhibition. As used herein, a “proteinaceous molecule,” “proteinaceous composition,” “proteinaceous compound,” “proteinaceous chain” or “proteinaceous material” generally refers to, but is not limited to, a protein of greater than about 200 amino acids or the full length endogenous sequence translated from a gene; a polypeptide of greater than about 100 amino acids; and/or a peptide of from about 3 to about 100 amino acids. All the “proteinaceous” terms described above may be used interchangeably herein.

[0076] In certain embodiments the size of the at least one proteinaceous molecule may comprise, but is not limited to, about 1, about 2, about 3, about 4, about 5, about 6, about 7, about 8, about 9, about 10, about 11, about 12, about 13, about 14, about 15, about 16, about 17, about 18, about 19, about 20, about 21, about 22, about 23, about 24, about 25, about 26, about 27, about 28, about 29, about 30, about 31, about 32, about 33, about 34, about 35, about 36, about 37, about 38, about 39 about 40, about 41, about 42, about 43, about 44, about 45, about 46, about 47, about 48, about 49, about 50, about 51, about 52, about 53, about 54, about 55, about 56, about 57, about 58, about 59, about 60, about 61, about 62, about 63, about 64, about 65, about 66, about 67, about 68, about 69, about 70, about 71, about 72, about 73, about 74, about 75, about 76, about 77, about 78, about 79, about 80, about 81, about 82, about 83, about 84, about 85, about 86, about 87, about 88, about 89, about 90, about 91, about 92, about 93, about 94, about 95, about 96, about 97, about 98, about 99, about 100, about 110, about 120, about 130, about 140, about 150, about 160, about 170, about 180, about 190, about 200, about 210, about 220, about 230, about 240, about 250, about 275, about 300, about 325, about 350, about 375, about 400, about 425, about 450, about 475, about 500, about 525, about 550, about 560, about 580, about 590, about 600, about 625, about 650, about 675, about 700, about 725, about 750, about 775, about 800, about 825, about 850, about 875, about 900, about 925, about 950, about 975, about 1000, about 1100, about 1200, about 1300, about 1400, about 1500, about 1750, about 2000, about 2250, about 2500 or greater amino molecule residues, and any range derivable therein.

[0077] As used herein, an “amino molecule” refers to any amino acid, amino acid derivative or amino acid mimic as would be known to one of ordinary skill in the art. In certain embodiments, the residues of the proteinaceous molecule are sequential, without any non-amino molecule interrupting the sequence of amino molecule residues. In other embodiments, the sequence may comprise one or more non-amino molecule moieties. In particular embodiments, the sequence of residues of the proteinaceous molecule may be interrupted by one or more non-amino molecule moieties.

[0078] Accordingly, the term “proteinaceous composition” encompasses amino molecule sequences comprising at least one of the 20 common amino acids in naturally synthesized proteins, or at least one modified or unusual amino acid, including but not limited to those shown on Table 1 below.

TABLE 1
Modified and Unusual Amino Acids

| Abbr. | Amino Acid | Abbr. | Amino Acid |
|---|---|---|---|
| Aad | 2-Aminoadipic acid | EtAsn | N-Ethylasparagine |
| Baad | 3-Aminoadipic acid | Hyl | Hydroxylysine |
| Bala | β-alanine, β-Amino- | AHyl | allo-Hydroxylysine |
| | propionic acid | | |
| Abu | 2-Aminobutyric acid | 3Hyp | 3-Hydroxyproline |
| 4Abu | 4-Aminobutyric acid, | 4Hyp | 4-Hydroxyproline |
| | piperidinic acid | | |
| Acp | 6-Aminocaproic acid | Ide | Isodesmosine |
| Ahe | 2-Aminoheptanoic acid | AIle | allo-Isoleucine |
| Aib | 2-Aminoisobutyric acid | MeGly | N-Methylglycine, |
| | | | sarcosine |
| Baib | 3-Aminoisobutyric acid | MeIle | N-Methylisoleucine |
| Apm | 2-Aminopimelic acid | MeLys | 6-N-Methyllysine |
| Dbu | 2,4-Diaminobutyric acid | MeVal | N-Methylvaline |
| Des | Desmosine | Nva | Norvaline |
| Dpm | 2,2′-Diaminopimelic acid | Nle | Norleucine |
| Dpr | 2,3-Diaminopropionic acid | Orn | Ornithine |
| EtGly | N-Ethylglycine | | |

[0079] In certain embodiments the proteinaceous composition comprises at least one protein, polypeptide or peptide, such as a hCHT or mCHT. In further embodiments the proteinaceous composition comprises a biocompatible protein, polypeptide or peptide. As used herein, the term “biocompatible” refers to a substance which produces no significant untoward effects when applied to, or administered to, a given organism according to the methods and amounts described herein. Such untoward or undesirable effects are those such as significant toxicity or adverse immunological reactions. In preferred embodiments, biocompatible protein, polypeptide or peptide containing compositions will generally be mammalian proteins or peptides or synthetic proteins or peptides each essentially free from toxins, pathogens and harmful immunogens.

[0080] Proteinaceous compositions may be made by any technique known to those of skill in the art, including the expression of proteins, polypeptides or peptides through standard molecular biological techniques, the isolation of proteinaceous compounds from natural sources, or the chemical synthesis of proteinaceous materials. The nucleotide and protein, polypeptide and peptide sequences for various genes have been previously disclosed, and may be found at computerized databases known to those of ordinary skill in the art. One such database is the National Center for Biotechnology Information's Genbank and GenPept databases (http://www.ncbi.nlm.nih.gov/). The coding regions for these known genes may be amplified and/or expressed using the techniques disclosed herein or as would be know to those of ordinary skill in the art. Alternatively, various commercial preparations of proteins, polypeptides and peptides are known to those of skill in the art.

[0081] In certain embodiments, a proteinaceous compound may be purified. Generally, “purified” will refer to a specific or desired protein, polypeptide, or peptide composition that has been subjected to fractionation to remove various other proteins, polypeptides, or peptides, and which composition substantially retains its activity, as may be assessed, for example, by the protein assays, as would be known to one of ordinary skill in the art for the specific or desired protein, polypeptide or peptide.

[0082] In certain embodiments, the proteinaceous composition may comprise at least one antibody. An hCHT or mCHT may comprise all or part of an antibody that specifically recognizes hCHT or mCHT. As used herein, the term “antibody” is intended to refer broadly to any immunologic binding agent such as IgG, IgM, IgA, IgD and IgE. Generally, IgG and/or IgM are preferred because they are the most common antibodies in the physiological situation and because they are most easily made in a laboratory setting.

[0083] The term “antibody” is used to refer to any antibody-like molecule that has an antigen binding region, and includes antibody fragments such as Fab′, Fab, F(ab′)₂, single domain antibodies (DABs), Fv, scFv (single chain Fv), and the like. The techniques for preparing and using various antibody-based constructs and fragments are well known in the art. Means for preparing and characterizing antibodies are also well known in the art (See, e.g., Antibodies: A Laboratory Manual, Cold Spring Harbor Laboratory, 1988; incorporated herein by reference).

[0084] It is contemplated that virtually any protein, polypeptide or peptide containing component may be used in the compositions and methods disclosed herein. However, it is preferred that the proteinaceous material is biocompatible. In certain embodiments, it is envisioned that the formation of a more viscous composition will be advantageous in that the high viscosity will allow the composition to be more precisely or easily applied to the tissue and to be maintained in contact with the tissue throughout the procedure. In such cases, the use of a peptide composition, or more preferably, a polypeptide or protein composition, is contemplated. Ranges of viscosity include, but are not limited to, about 40 to about 100 poise. In certain aspects, a viscosity of about 80 to about 100 poise is preferred.

[0085] Proteins and peptides suitable for use in this invention may be autologous proteins or peptides, although the invention is clearly not limited to the use of such autologous proteins. As used herein, the term “autologous protein, polypeptide or peptide” refers to a protein, polypeptide or peptide which is derived or obtained from an organism. Organisms that may be used include, but are not limited to, a bovine, a reptilian, an amphibian, a piscine, a rodent, an avian, a canine, a feline, a fungal, a plant, or a prokaryotic organism, with a selected animal or human subject being preferred. The “autologous protein, polypeptide or peptide” may then be used as a component of a composition intended for application to the selected animal or human subject. In certain aspects, the autologous proteins or peptides are prepared, for example from whole plasma of the selected donor. The plasma is placed in tubes and placed in a freezer at about −80° C. for at least about 12 hours and then centrifuged at about 12,000 times g for about 15 minutes to obtain the precipitate. The precipitate, such as fibrinogen may be stored for up to about one year.

[0086] V. Genes and DNA Segments

[0087] Important aspects of the present invention concern isolated DNA segments and recombinant vectors encoding CHTs, or more particularly human and mouse CHTs (hCHT and mCHT), as well as the creation and use of recombinant host cells through the application of DNA technology, that express a wild-type, polymorphic or mutant CHTs. Other aspects of the present invention concern isolated DNA segments and recombinant vectors encoding hCHT and mCHT inhibitors. Sequences of SEQ ID NO:1, SEQ ID NO:3 and biologically functional equivalents thereof are used in the current invention. The DNA segments and recombinant vectors encoding CHTs can be used in the invention, for example for creating dominant negatives, for screening of candidate substances and determining the effects of gene disruption on tolerance and dependence.

[0088] The present invention concerns DNA segments, isolatable from mammalian cells, such as mouse or human cells, that are free from total genomic DNA and that are capable of expressing a protein, polypeptide or peptide that has hCHT or mCHT activity or is capable of inhibiting CHT, or more particularly hCHT or mCHT. As used herein, the term “DNA segment” refers to a DNA molecule that has been isolated free of total genomic DNA of a particular species. Therefore, a DNA segment encoding CHT refers to a DNA segment that contains wild-type, polymorphic or mutant CHT coding sequences yet is isolated away from, or purified free from, total mammalian genomic DNA. Included within the term “DNA segment,” are DNA segments and smaller fragments of such segments, and also recombinant vectors, including, for example, plasmids, cosmids, phage, viruses, and the like.

[0089] Similarly, a DNA segment comprising an isolated or purified hCHT or mCHT gene refers to a DNA segment including hCHT or mCHT protein, polypeptide or peptide coding sequences and, in certain aspects, regulatory sequences, isolated substantially away from other naturally occurring genes or protein encoding sequences. In this respect, the term “gene” is used for simplicity to refer to a functional protein, polypeptide or peptide encoding unit. As will be understood by those in the art, this functional term includes both genomic sequences, cDNA sequences and engineered segments that express, or may be adapted to express, proteins, polypeptides, domains, peptides, fusion proteins and mutants of CHT encoded sequences.

[0090] “Isolated substantially away from other coding sequences” means that the gene of interest, in this case the CHT, or more particularly hCHT or mCHT genes, forms the significant part of the coding region of the DNA segment, and that the DNA segment does not contain large portions of naturally-occurring coding DNA, such as large chromosomal fragments or other functional genes or cDNA coding regions. Of course, this refers to the DNA segment as originally isolated, and does not exclude genes or coding regions later added to the segment by the hand of man.

[0091] In particular embodiments, the invention concerns isolated DNA segments and recombinant vectors incorporating DNA sequences that encode a CHT protein, polypeptide or peptide that includes within its amino acid sequence a contiguous amino acid sequence in accordance with, or essentially as set forth in SEQ ID NO: 2, corresponding to the hCHT designated “human CHT” and as set forth in SEQ ID NO: 4, corresponding to the mCHT designated “mouse CHT”.

[0092] The term “a sequence essentially as set forth in SEQ ID NO: 2” means, for example, that the sequence substantially corresponds to a portion of SEQ ID NO: 2 and has relatively few amino acids that are not identical to, or a biologically functional equivalent of, the amino acids of SEQ ID NO: 2. This applies with respect to the other peptide or polypeptide sequences herewith.

[0093] The term “biologically functional equivalent” is well understood in the art and is further defined in detail herein. Accordingly, sequences that have about 70%, about 71%, about 72%, about 73%, about 74%, about 75%, about 76%, about 77%, about 78%, about 79%, about 80%, about 81%, about 82%, about 83%, about 84%, about 85%, about 86%, about 87%, about 88%, about 89%, about 90%, about 91%, about 92%, about 93%, about 94%, about 95%, about 96%, about 97%, about 98%, or about 99%, and any range derivable therein, such as, for example, about 70% to about 80%, and more preferably about 81% and about 90%; or even more preferably, between about 91% and about 99%; of amino acids that are identical or functionally equivalent to the amino acids of SEQ ID NO: 2 will be sequences that are “essentially as set forth in SEQ ID NO: 2, provided the biological activity of the protein is maintained. In particular embodiments, the biological activity of a hCHT or mCHT protein, polypeptide or peptide, or a biologically functional equivalent, comprises binding to one or more proteases. In specific embodiments, the biological activity of a hCHT or mCHT protein, polypeptide or peptide, or a biologically functional equivalent, comprises inhibition of the activity of one or more proteases, through binding. A preferred protease activity that may be inhibited by a hCHT or mCHT protein, polypeptide or peptide, or a biologically functional equivalent, is inhibition of the ability or rate of protealytic cleavage catalyzed by the protease.

[0094] In certain other embodiments, the invention concerns isolated DNA segments and recombinant vectors that include within their sequence a nucleic acid sequence essentially as set forth in SEQ ID NO:1 or SEQ ID NO:3. The term “essentially as set forth in SEQ ID NO: 1” is used in the same sense as described above and means that the nucleic acid sequence substantially corresponds to a portion of SEQ ID NO: 1 and has relatively few codons that are not identical, or functionally equivalent, to the codons of SEQ ID NO: 1. Again, DNA segments that encode proteins, polypeptide or peptides exhibiting hCHT or mCHT activity will be most preferred.

[0095] The term “functionally equivalent codon” is used herein to refer to codons that encode the same amino acid, such as the six codons for arginine and serine, and also refers to codons that encode biologically equivalent amino acids. For optimization of expression of hCHT or mCHT in human cells, the codons are shown in Table 2 in preference of use from left to right. Thus, the most preferred codon for alanine is thus “GCC,” and the least is “GCG” (see Table 2 below). Codon usage for various organisms and organelles can be found at the website http://www.kazusa.orjp/codon/, incorporated herein by reference, allowing one of skill in the art to optimize codon usage for expression in various organisms using the disclosures herein. Thus, it is contemplated that codon usage may be optimized for other animals, as well as other organisms such as a prokaryote (e.g, an eubacteria), an archaea, an eukaryote (e.g., a protist, a plant, a fungus, an animal), a virus and the like, as well as organelles that contain nucleic acids, such as mitochondria or chloroplasts, based on the preferred codon usage as would be known to those of ordinary skill in the art.

TABLE 2
Preferred Human DNA Codons

| | |
|---|---|
| Amino Acids | Codons |

| | | | |
|---|---|---|---|
| Alanine | Ala | A | GCC GCT GCA GCG |
| Cysteine | Cys | C | TGC TGT |
| Aspartic acid | Asp | D | GAC GAT |
| Glutamic acid | Glu | E | GAG GAA |
| Phenylalanine | Phe | F | TTC TTT |
| Glycine | Gly | G | GGC GGG GGA GGT |
| Histidine | His | H | CAC CAT |
| Isoleucine | Ile | I | ATC ATT ATA |
| Lysine | Lys | K | AAG AAA |
| Leucine | Leu | L | CTG CTC TTG CTT CTA TTA |
| Methionine | Met | M | ATG |
| Asparagine | Asn | N | AAC AAT |
| Proline | Pro | P | CCC CCT CCA CCG |
| Glutamine | Gln | Q | CAG CAA |
| Arginine | Arg | R | CGC AGG CGG AGA CGA CGT |
| Serine | Ser | S | AGC TCC TCT AGT TCA TCG |
| Threonine | Thr | T | ACC ACA ACT ACG |
| Valine | Val | V | GTG GTC GTT GTA |
| Tryptophan | Trp | W | TGG |
| Tyrosine | Tyr | Y | TAC TAT |

[0096] It will also be understood that amino acid and nucleic acid sequences may include additional residues, such as additional N- or C-terminal amino acids or 5′ or 3′ sequences, and yet still be essentially as set forth in one of the sequences disclosed herein, so long as the sequence meets the criteria set forth above, including the maintenance of biological protein, polypeptide or peptide activity. The addition of terminal sequences particularly applies to nucleic acid sequences that may, for example, include various non-coding sequences flanking either of the 5′ or 3′ portions of the coding region or may include various internal sequences, i.e., introns, which are known to occur within genes.

[0097] Excepting intronic or flanking regions, and allowing for the degeneracy of the genetic code, sequences that have about 70%, about 71%, about 72%, about 73%, about 74%, about 75%, about 76%, about 77%, about 78%, about 79%, about 80%, about 81%, about 82%, about 83%, about 84%, about 85%, about 86%, about 87%, about 88%, about 89%, about 90%, about 91%, about 92%, about 93%, about 94%, about 95%, about 96%, about 97%, about 98%, or about 99%, and any range derivable therein, such as, for example, about 70% to about 80%, and more preferably about 81% and about 90%; or even more preferably, between about 91% and about 99%; of nucleotides that are identical to the nucleotides of SEQ ID NO: 1 will be sequences that are “essentially as set forth in SEQ ID NO: 1.” This is also true for nucleotides of SEQ ID NO:3, etc.

[0098] a. Nucleic Acid Hybridization

[0099] The nucleic acid sequences disclosed herein also have a variety of uses, such as for example, utility as probes or primers in nucleic acid hybridization embodiments. Contiguous sequences from hCHT or mCHT sequences can be used, for example, to form dominant negatives of the hCHT or mCHT, used to screen for inhibitor function.

[0100] Naturally, the present invention also encompasses DNA segments that are complementary, or essentially complementary, to the sequence set forth in SEQ ID NO:1 or SEQ ID NO:3. Nucleic acid sequences that are “complementary” are those that are capable of base-pairing according to the standard Watson-Crick complementarily rules. As used herein, the term “complementary sequences” means nucleic acid sequences that are complementary, as may be assessed by the same nucleotide comparison set forth above, or as defined as being capable of hybridizing to the nucleic acid segment of SEQ ID NO:1 or SEQ ID NO:3 under stringent conditions such as those described herein.

[0101] As used herein, “hybridization,” “hybridizes” or “capable of hybridizing” is understood to mean the forming of a double or triple stranded molecule or a molecule with partial double or triple stranded nature. The term “hybridization,” “hybridize(s)” or “capable of hybridizing” encompasses the terms “stringent condition(s)” or “high stringency” and the terms “low stringency” or “low stringency condition(s).”

[0102] As used herein “stringent condition(s)” or “high stringency” are those conditions that allow hybridization between or within one or more nucleic acid strand(s) containing complementary sequence(s), but precludes hybridization of random sequences. Stringent conditions tolerate little, if any, mismatch between a nucleic acid and a target strand. Such conditions are well known to those of ordinary skill in the art, and are preferred for applications requiring high selectivity. Non-limiting applications include isolating a nucleic acid, such as a gene or a nucleic acid segment thereof, or detecting at least one specific mRNA transcript or a nucleic acid segment thereof, and the like.

[0103] Stringent conditions may comprise low salt and/or high temperature conditions, such as provided by about 0.02 M to about 0.15 M NaCl at temperatures of about 50° C. to about 70° C. It is understood that the temperature and ionic strength of a desired stringency are determined in part by the length of the particular nucleic acid(s), the length and nucleobase content of the target sequence(s), the charge composition of the nucleic acid(s), and to the presence or concentration of formamide, tetramethylammonium chloride or other solvent(s) in a hybridization mixture.

[0104] It is also understood that these ranges, compositions and conditions for hybridization are mentioned by way of non-limiting examples only, and that the desired stringency for a particular hybridization reaction is often determined empirically by comparison to one or more positive or negative controls. Depending on the application envisioned it is preferred to employ varying conditions of hybridization to achieve varying degrees of selectivity of a nucleic acid towards a target sequence. In a non-limiting example, identification or isolation of a related target nucleic acid that does not hybridize to a nucleic acid under stringent conditions may be achieved by hybridization at low temperature and/or high ionic strength. For example, a medium stringency condition could be provided by about 0.1 to 0.25 M NaCl at temperatures of about 37° C. to about 55° C. Under these conditions, hybridization may occur even though the sequences of probe and target strand are not perfectly complementary, but are mismatched at one or more positions. In another example, a low stringency condition could be provided by about 0.15 M to about 0.9 M salt, at temperatures ranging from about 20° C. to about 55° C. Of course, it is within the skill of one in the art to further modify the low or high stringency conditions to suit a particular application. For example, in other embodiments, hybridization may be achieved under conditions of 50 mM Tris-HCl (pH 8.3), 75 mM KCl, 3 mM MgCl₂, 1.0 mM dithiothreitol, at temperatures between approximately 20° C. to about 37° C. Other hybridization conditions utilized could include approximately 10 mM Tris-HCl (pH 8.3), 50 mM KCl, 1.5 MM MgCl₂, at temperatures ranging from approximately 40° C. to about 72° C.

[0105] Accordingly, the nucleotide sequences of the disclosure may be used for their ability to selectively form duplex molecules with complementary stretches of genes or RNAs or to provide primers for amplification of DNA or RNA from tissues. Depending on the application envisioned, it is preferred to employ varying conditions of hybridization to achieve varying degrees of selectivity of probe towards target sequence.

[0106] The nucleic acid segments of the present invention, regardless of the length of the coding sequence itself, may be combined with other DNA sequences, such as promoters, enhancers, polyadenylation signals, additional restriction enzyme sites, multiple cloning sites, other coding segments, and the like, such that their overall length may vary considerably. It is therefore contemplated that a nucleic acid fragment of almost any length may be employed, with the total length preferably being limited by the ease of preparation and use in the intended recombinant DNA protocol.

[0107] For example, nucleic acid fragments may be prepared that include a contiguous stretch of nucleotides identical to or complementary to SEQ ID NO: 1 or SEQ ID NO:3, such as, for example, about 8, about 10 to about 14, or about 15 to about 20 nucleotides, and that are chromosome sized pieces, up to about 1,000,000, about 750,000, about 500,000, about 250,000, about 100,000, about 50,000, about 20,000, or about 10,000, or about 5,000 base pairs in length, with segments of about 3,000 being preferred in certain cases, as well as DNA segments with total lengths of about 1,000, about 500, about 200, about 100 and about 50 base pairs in length (including all intermediate lengths of these lengths listed above, i.e., any range derivable therein and any integer derivable therein such a range) are also contemplated to be useful.

[0108] For example, it will be readily understood that “intermediate lengths,” in these contexts, means any length between the quoted ranges, such as 6, 7, 8, 9, 10, 11, 12, 13, 14, 15, 16, 17, 18, 19, 20, 21, 22, 23, 24, 25, 26, 27, 28, 29, 30, 31, 32, 33, 34, 35, 36, 37, 38, 39, 40, 41, 42, 43, 44, 45, 46, 47, 48, 49, 50, 51, 52, 53, 54, 55, 56, 57, 58, 59, 60, 65, 70, 75, 80, 85, 90, 95, 100, 105, 110, 115, 120, 130, 140, 150, 160, 170, 180, 190, including all integers through the 200-500; 500-1,000; 1,000-1500, 1600, 1700, 1743, and up to 2,000; 2,000-3,000; 3,000-5,000; 5,000-10,000 ranges, up to and including sequences of about 12,001, 12,002, 13,001, 13,002, 15,000, 20,000 and the like.

[0109] Various nucleic acid segments may be designed based on a particular nucleic acid sequence, and may be of any length. By assigning numeric values to a sequence, for example, the first residue is 1, the second residue is 2, etc., an algorithm defining all nucleic acid segments can be created:

[0110] n to n+y

[0111] where n is an integer from 1 to the last number of the sequence and y is the length of the nucleic acid segment minus one, where n+y does not exceed the last number of the sequence. Thus, for a 10-mer, the nucleic acid segments correspond to bases 1 to 10, 2 to 11, 3 to 12 . . . and/or so on. For a 15-mer, the nucleic acid segments correspond to bases 1 to 15, 2 to 16, 3 to 17 . . . and/or so on. For a 20-mer, the nucleic segments correspond to bases 1 to 20, 2 to 21, 3 to 22 . . . and/or so on. In certain embodiments, the nucleic acid segment may be a probe or primer. As used herein, a “probe” generally refers to a nucleic acid used in a detection method or composition. As used herein, a “primer” generally refers to a nucleic acid used in an extension or amplification method or composition.

[0112] The use of a hybridization probe of between 17 and 100 nucleotides in length, or in some aspect of the invention even up to 1-2 Kb or more in length, allows the formation of a duplex molecule that is both stable and selective. Molecules having complementary sequences over stretches greater than 20 bases in length are generally preferred, in order to increase stability and selectivity of the hybrid, and thereby improve the quality and degree of particular hybrid molecules obtained. One will generally prefer to design nucleic acid molecules having complementary sequences over stretches of 20 to 30 nucleotides, or even longer where desired. Such fragments may be readily prepared by, for example, directly synthesizing the fragment by chemical means or by introducing selected sequences into recombinant vectors for recombinant production.

[0113] In general, it is envisioned that the hybridization probes described herein will be useful both as reagents in solution hybridization, as in PCR™, for detection of expression of corresponding genes, as well as in embodiments employing a solid phase. In embodiments involving a solid phase, the test DNA (or RNA) is adsorbed or otherwise affixed to a selected matrix or surface. This fixed, single-stranded nucleic acid is then subjected to hybridization with selected probes under desired conditions. The selected conditions will depend on the particular circumstances based on the particular criteria required (depending, for example, on the G+C content, type of target nucleic acid, source of nucleic acid, size of hybridization probe, etc.). Following washing of the hybridized surface to remove non-specifically bound probe molecules, hybridization is detected, or even quantified, by means of the label.

[0114] b. Nucleic Acid Amplification

[0115] Nucleic acid used as a template for amplification is isolated from cells contained in the biological sample, according to standard methodologies (Sambrook et al., 1989). The nucleic acid may be genomic DNA or fractionated or whole cell RNA. Where RNA is used, it may be desired to convert the RNA to a complementary DNA. In one embodiment, the RNA is whole cell RNA and is used directly as the template for amplification.

[0116] Pairs of primers that selectively hybridize to nucleic acids corresponding to hCHT or mCHT genes are contacted with the isolated nucleic acid under conditions that permit selective hybridization. The term “primer,” as defined herein, is meant to encompass any nucleic acid that is capable of priming the synthesis of a nascent nucleic acid in a template-dependent process. Typically, primers are oligonucleotides from ten to twenty or thirty base pairs in length, but longer sequences can be employed. Primers may be provided in double-stranded or single-stranded form, although the single-stranded form is preferred.

[0117] Once hybridized, the nucleic acid:primer complex is contacted with one or more enzymes that facilitate template-dependent nucleic acid synthesis. Multiple rounds of amplification, also referred to as “cycles,” are conducted until a sufficient amount of amplification product is produced.

[0118] Next, the amplification product is detected. In certain applications, the detection may be performed by visual means. Alternatively, the detection may involve indirect identification of the product via chemiluminescence, radioactive scintigraphy of incorporated radiolabel or fluorescent label, or even via a system using electrical or thermal impulse signals (Affymax technology).

[0119] A number of template dependent processes are available to amplify the marker sequences present in a given template sample. One of the best known amplification methods is the polymerase chain reaction (referred to as PCR™) which is described in detail in U.S. Pat. Nos. 4,683,195, 4,683,202 and 4,800,159, each incorporated herein by reference in its entirety.

[0120] Briefly, in PCR™, two primer sequences are prepared that are complementary to regions on opposite complementary strands of the marker sequence. An excess of deoxynucleoside triphosphates are added to a reaction mixture along with a DNA polymerase, e.g., Taq polymerase. If the marker sequence is present in a sample, the primers will bind to the marker and the polymerase will cause the primers to be extended along the marker sequence by adding on nucleotides. By raising and lowering the temperature of the reaction mixture, the extended primers will dissociate from the marker to form reaction products, excess primers will bind to the marker and to the reaction products, and the process is repeated.

[0121] A reverse transcriptase PCR™ amplification procedure may be performed in order to quantify the amount of mRNA amplified. Methods of reverse transcribing RNA into cDNA are well known and described in Sambrook et al, 1989. Alternative methods for reverse transcription utilize thermostable, RNA-dependent DNA polymerases. These methods are described in WO 90/07641, filed Dec. 21, 1990, incorporated herein by reference. Polymerase chain reaction methodologies are well known in the art.

[0122] Another method for amplification is the ligase chain reaction (“LCR”), disclosed in EPA No. 320 308, incorporated herein by reference in its entirety. In LCR, two complementary probe pairs are prepared, and in the presence of the target sequence, each pair will bind to opposite complementary strands of the target such that they abut. In the presence of a ligase, the two probe pairs will link to form a single unit. By temperature cycling, as in PCR™, bound ligated units dissociate from the target and then serve as “target sequences” for ligation of excess probe pairs. U.S. Pat. No. 4,883,750 describes a method similar to LCR for binding probe pairs to a target sequence.

[0123] Qbeta Replicase, described in PCT Application No. PCT/US87/00880, incorporated herein by reference, may also be used as still another amplification method in the present invention. In this method, a replicative sequence of RNA that has a region complementary to that of a target is added to a sample in the presence of an RNA polymerase. The polymerase will copy the replicative sequence which can then be detected.

[0124] An isothermal amplification method, in which restriction endonucleases and ligases are used to achieve the amplification of target molecules that contain nucleotide 5′-[alpha-thio]-triphosphates in one strand of a restriction site may also be useful in the amplification of nucleic acids in the present invention.

[0125] Strand Displacement Amplification (SDA) is another method of carrying out isothermal amplification of nucleic acids which involves multiple rounds of strand displacement and synthesis, i.e., nick translation. A similar method, called Repair Chain Reaction (RCR), involves annealing several probes throughout a region targeted for amplification, followed by a repair reaction in which only two of the four bases are present. The other two bases can be added as biotinylated derivatives for easy detection. A similar approach is used in SDA. Target specific sequences can also be detected using a cyclic probe reaction (CPR). In CPR, a probe having 3′ and 5′ sequences of non-specific DNA and a middle sequence of specific RNA is hybridized to DNA that is present in a sample. Upon hybridization, the reaction is treated with RNase H, and the products of the probe identified as distinctive products that are released after digestion. The original template is annealed to another cycling probe and the reaction is repeated.

[0126] Still another amplification method described in GB Application No. 2 202 328, and in PCT Application No. PCT/US89/01025, each of which is incorporated herein by reference in its entirety, may be used in accordance with the present invention. In the former application, “modified” primers are used in a PCR-like, template- and enzyme-dependent synthesis. The primers may be modified by labeling with a capture moiety (e.g., biotin) and/or a detector moiety (e.g., enzyme). In the latter application, an excess of labeled probes are added to a sample. In the presence of the target sequence, the probe binds and is cleaved catalytically. After cleavage, the target sequence is released intact to be bound by excess probe. Cleavage of the labeled probe signals the presence of the target sequence.

[0127] Other nucleic acid amplification procedures include transcription-based amplification systems (TAS), including nucleic acid sequence based amplification (NASBA) and 3SR (Gingeras et al., PCT Application WO 88/10315, incorporated herein by reference). In NASBA, the nucleic acids can be prepared for amplification by standard phenol/chloroform extraction, heat denaturation of a clinical sample, treatment with lysis buffer and minispin columns for isolation of DNA and RNA or guanidinium chloride extraction of RNA. These amplification techniques involve annealing a primer which has target specific sequences. Following polymerization, DNA/RNA hybrids are digested with RNase H while double-stranded DNA molecules are heat denatured again. In either case, the single-stranded DNA is made fully double-stranded by addition of second target specific primer, followed by polymerization. The double-stranded DNA molecules are then multiply transcribed by an RNA polymerase such as T7 or SP6. In an isothermal cyclic reaction, the RNAs are reverse transcribed into single-stranded DNA, which is then converted to double-stranded DNA, and then transcribed once again with an RNA polymerase such as T7 or SP6. The resulting products, whether truncated or complete, indicate target specific sequences.

[0128] Davey et al., EPA No. 329 822 (incorporated herein by reference in its entirety) disclose a nucleic acid amplification process involving cyclically synthesizing single-stranded RNA (“ssRNA”), ssDNA, and double-stranded DNA (dsDNA), which may be used in accordance with the present invention. The ssRNA is a template for a first primer oligonucleotide, which is elongated by reverse transcriptase (RNA-dependent DNA polymerase). The RNA is then removed from the resulting DNA:RNA duplex by the action of ribonuclease H(RNase H, an RNase specific for RNA in duplex with either DNA or RNA). The resultant ssDNA is a template for a second primer, which also includes the sequences of an RNA polymerase promoter (exemplified by T7 RNA polymerase) 5′ to its homology to the template. This primer is then extended by DNA polymerase (exemplified by the large “Klenow” fragment of E. coli DNA polymerase I), resulting in a double-stranded DNA (“dsDNA”) molecule, having a sequence identical to that of the original RNA between the primers and having additionally, at one end, a promoter sequence. This promoter sequence can be used by the appropriate RNA polymerase to make many RNA copies of the DNA. These copies can then re-enter the cycle leading to very swift amplification. With proper choice of enzymes, this amplification can be done isothermally without addition of enzymes at each cycle. Because of the cyclical nature of this process, the starting sequence can be chosen to be in the form of either DNA or RNA.

[0129] Miller et al., PCT Application WO 89/06700 (incorporated herein by reference in its entirety) disclose a nucleic acid sequence amplification scheme based on the hybridization of a promoter/primer sequence to a target single-stranded DNA (“ssDNA”) followed by transcription of many RNA copies of the sequence. This scheme is not cyclic, i.e., new templates are not produced from the resultant RNA transcripts. Other amplification methods include “RACE” and “one-sided PCR” (Frohman, 1990, incorporated herein by reference).

[0130] Methods based on ligation of two (or more) oligonucleotides in the presence of nucleic acid having the sequence of the resulting “di-oligonucleotide,” thereby amplifying the di-oligonucleotide, may also be used in the amplification step of the present invention.

[0131] c. Nucleic Acid Detection

[0132] In certain embodiments, it will be advantageous to employ nucleic acid sequences of the present invention such as all or part of SEQ ID NO:1 or SEQ ID NO:3, or an hCHT or mCHT nucleic acid inhibitor in combination with an appropriate means, such as a label, for hybridization assays, RNase protection and Northern hybridization. A wide variety of appropriate indicator means are known in the art, including fluorescent, radioactive, enzymatic or other ligands, such as avidin/biotin, which are capable of being detected. In preferred embodiments, one may desire to employ a fluorescent label or an enzyme tag such as urease, alkaline phosphatase or peroxidase, instead of radioactive or other environmentally undesirable reagents. In the case of enzyme tags, calorimetric indicator substrates are known that can be employed to provide a detection means visible to the human eye or spectrophotometrically, to identify specific hybridization with complementary nucleic acid-containing samples.

[0133] In embodiments wherein nucleic acids are amplified, it may be desirable to separate the amplification product from the template and the excess primer for the purpose of determining whether specific amplification has occurred. In one embodiment, amplification products are separated by agarose, agarose-acrylamide or polyacrylamide gel electrophoresis using standard methods (Sambrook et al., 1989).

[0134] Alternatively, chromatographic techniques may be employed to effect separation. There are many kinds of chromatography which may be used in the present invention: adsorption, partition, ion-exchange and molecular sieve, and many specialized techniques for using them including column, paper, thin-layer and gas chromatography.

[0135] Amplification products must be visualized in order to confirm amplification of the marker sequences. One typical visualization method involves staining of a gel with ethidium bromide and visualization under UV light. Alternatively, if the amplification products are integrally labeled with radio- or fluorometrically-labeled nucleotides, the amplification products can then be exposed to x-ray film or visualized under the appropriate stimulating spectra, following separation.

[0136] In one embodiment, visualization is achieved indirectly. Following separation of amplification products, a labeled, nucleic acid probe is brought into contact with the amplified marker sequence. The probe preferably is conjugated to a chromophore but may be radiolabeled. In another embodiment, the probe is conjugated to a binding partner, such as an antibody or biotin, and the other member of the binding pair carries a detectable moiety.

[0137] In one embodiment, detection is by Southern blotting and hybridization with a labeled probe. The techniques involved in Southern blotting are well known to those of skill in the art and can be found in many standard books on molecular protocols (see Sambrook et al., 1989). Briefly, amplification products are separated by gel electrophoresis. The gel is then contacted with a membrane, such as nitrocellulose, permitting transfer of the nucleic acid and non-covalent binding. Subsequently, the membrane is incubated with a chromophore-conjugated probe that is capable of hybridizing with a target amplification product. Detection is by exposure of the membrane to x-ray film or ion-emitting detection devices.

[0138] One example of the foregoing is described in U.S. Pat. No. 5,279,721, incorporated by reference herein, which discloses an apparatus and method for the automated electrophoresis and transfer of nucleic acids. The apparatus permits electrophoresis and blotting without external manipulation of the gel and is ideally suited to carrying out methods according to the present invention.

[0139] Other methods for genetic screening to accurately detect mutations in genomic DNA, cDNA or RNA samples may be employed, depending on the specific situation.

[0140] Historically, a number of different methods have been used to detect point mutations, including denaturing gradient gel electrophoresis (“DGGE”), restriction enzyme polymorphism analysis, chemical and enzymatic cleavage methods, and others. The more common procedures currently in use include direct sequencing of target regions amplified by PCR™ (see above) and single-strand conformation polymorphism analysis (“SSCP”).

[0141] Another method of screening for point mutations is based on RNase cleavage of base pair mismatches in RNA/DNA and RNA/RNA heteroduplexes. As used herein, the term “mismatch” is defined as a region of one or more unpaired or mispaired nucleotides in a double-stranded RNA/RNA, RNA/DNA or DNA/DNA molecule. This definition thus includes mismatches due to insertion/deletion mutations, as well as single and multiple base point mutations.

[0142] U.S. Pat. No. 4,946,773 describes an RNase A mismatch cleavage assay that involves annealing single-stranded DNA or RNA test samples to an RNA probe, and subsequent treatment of the nucleic acid duplexes with RNase A. After the RNase cleavage reaction, the RNase is inactivated by proteolytic digestion and organic extraction, and the cleavage products are denatured by heating and analyzed by electrophoresis on denaturing polyacrylamide gels. For the detection of mismatches, the single-stranded products of the RNase A treatment, electrophoretically separated according to size, are compared to similarly treated control duplexes. Samples containing smaller fragments (cleavage products) not seen in the control duplex are scored as positive.

[0143] Currently available RNase mismatch cleavage assays, including those performed according to U.S. Pat. No. 4,946,773, require the use of radiolabeled RNA probes. Myers and Maniatis in U.S. Pat. No. 4,946,773 describe the detection of base pair mismatches using RNase A. Other investigators have described the use of an E. coli enzyme, RNase I, in mismatch assays. Because it has broader cleavage specificity than RNase A, RNase I would be a desirable enzyme to employ in the detection of base pair mismatches if components can be found to decrease the extent of non-specific cleavage and increase the frequency of cleavage of mismatches. The use of RNase I for mismatch detection is described in literature from Promega Biotech. Promega markets a kit containing RNase I that is shown in their literature to cleave three out of four known mismatches;-provided the enzyme level is sufficiently high.

[0144] The RNase protection assay was first used to detect and map the ends of specific mRNA targets in solution. The assay relies on being able to easily generate high specific activity radiolabeled RNA probes complementary to the mRNA of interest by in vitro transcription. Originally, the templates for in vitro transcription were recombinant plasmids containing bacteriophage promoters. The probes are mixed with total cellular RNA samples to permit hybridization to their complementary targets, then the mixture is treated with RNase to degrade excess unhybridized probe. Also, as originally intended, the RNase used is specific for single-stranded RNA, so that hybridized double-stranded probe is protected from degradation. After inactivation and removal of the RNase, the protected probe (which is proportional in amount to the amount of target mRNA that was present) is recovered and analyzed on a polyacrylamide gel.

[0145] The RNase Protection assay was adapted for detection of single base mutations. In this type of RNase A mismatch cleavage assay, radiolabeled RNA probes transcribed in vitro from wild-type sequences are hybridized to complementary target regions derived from test samples. The test target generally comprises DNA (either genomic DNA or DNA amplified by cloning in plasmids or by PCR™), although RNA targets (endogenous mRNA) have occasionally been used. If single nucleotide (or greater) sequence differences occur between the hybridized probe and target, the resulting disruption in Watson-Crick hydrogen bonding at that position (“mismatch”) can be recognized and cleaved in some cases by single-strand specific ribonuclease. To date, RNase A has been used almost exclusively for cleavage of single-base mismatches, although RNase I has recently been shown as useful also for mismatch cleavage. There are recent descriptions of using the MutS protein and other DNA-repair enzymes for detection of single-base mismatches.

[0146] d. Cloning hCHT or mCHT Genes

[0147] The present invention contemplates cloning CHT, or more particularly hCHT or mCHT genes or cDNAs from animal (e.g., mammalian) organisms. A technique often employed by those skilled in the art of protein production today is to obtain a so-called “recombinant” version of the protein, to express it in a recombinant cell and to obtain the protein, polypeptide or peptide from such cells. These techniques are based upon the “cloning” of a DNA molecule encoding the protein from a DNA library, i.e., on obtaining a specific DNA molecule distinct from other portions of DNA. This can be achieved by, for example, cloning a cDNA molecule, or cloning a genomic-like DNA molecule.

[0148] The first step in such cloning procedures is the screening of an appropriate DNA library, such as, for example, from a mouse, rat, monkey or human. The screening protocol may utilize nucleotide segments or probes that are designed to hybridize to cDNA or genomic sequences of CHTs from protists. Additionally, antibodies designed to bind to the expressed CHT proteins, polypeptides, or peptides may be used as probes to screen an appropriate mammalian DNA expression library. Alternatively, activity assays may be employed. The operation of such screening protocols are well known to those of skill in the art and are described in detail in the scientific literature, for example, in Sambrook et al. (1989), incorporated herein by reference. Moreover, as the present invention encompasses the cloning of genomic segments as well as cDNA molecules, it is contemplated that suitable genomic cloning methods, as known to those in the art, may also be used.

[0149] As used herein “designed to hybridize” means a sequence selected for its likely ability to hybridize to a mammalian CHT gene, for example due to the expected high degree of homology between the human CHT gene and the CHT genes from other mammals. Also included are segments or probes altered to enhance their ability to hybridize to or bind to a mammalian CHT gene. Additionally, these regions of homology also include amino acid sequences of 4 or more consecutive amino acids selected and/or altered to increase conservation of the amino acid sequences in comparison to the same or similar region of residues in the same or related genes in one or more species. Such amino acid sequences may derived from amino acid sequences encoded by the CHT gene and particularly from the isolated sequences of SEQ ID NO:2 or SEQ ID NO:4.

[0150] General methods for screening a mammalian DNA library are exemplified by, but not limited to, the methods detailed in Example 1 herein below. Nucleotide probes may derived from nucleotide sequences from the human or mouse CHT sequence, and more particularly from the isolated sequences of SEQ ID NO:1 or SEQ ID NO:3. Such sequences may be used as probes for hybridization or oligonucleotide primers for PCR™. Designing such sequences may involve selection of regions of highly conserved nucleotide sequences between various species for a particular gene or related genes, relative to the general conservation of nucleotides of the gene or related genes in one or more species. Comparison of the amino acid sequences conserved between one or more species for a particular gene may also be used to determine a group of 4 or more consecutive amino acids that are conserved relative to the protein encoded by the gene or related genes. The nucleotide probe or primers may then be designed from the region of the gene that encodes the conserved sequence of amino acids.

[0151] One may also prepare fusion proteins, polypeptides and peptides, e.g. where the hCHT or mCHT proteinaceous material coding regions are aligned within the same expression unit with other proteins, polypeptides or peptides having desired functions, such as for purification or immunodetection purposes (e.g., proteinaceous compostions that may be purified by affinity chromatography and enzyme label coding regions, respectively).

[0152] Encompassed by the invention are DNA segments encoding relatively small peptides, such as, for example, peptides of from about 8, about 9, about 10, about 11, about 12, about 13, about 14, about 15, about 16, about 17, about 18, about 19, about 20, about 21, about 22, about 23, about 24, about 25, about 26, about 27, about 28, about 29, about 30, about 31, about 32, about 33, about 34, about 35, about 35, about 40, about 45, to about 50 amino acids in length, and more preferably, of from about 15 to about 30 amino acids in length; as set forth in SEQ ID NO:2 or SEQ ID NO:4 and also larger polypeptides up to and including proteins corresponding to the full-length sequences set forth in SEQ ID NO:2 or SEQ ID NO:4, and any range derivable therein and any integer derivable therein such a range. In addition to the “standard” DNA and RNA nucleotide bases, modified bases are also contemplated for use in particular applications of the present invention. A table of exemplary, but not limiting, modified bases is provided herein below.

TABLE 3
Modified Bases

| Abbr | Modified base description | Abbr | Modified base description |
|---|---|---|---|
| ac4c | 4-acetylcytidine | Mam5s2u | 5-methoxyaminomethyl-2-thiouridine |
| chm5u | 5-(carboxyhydroxylmethyl)uridine | Man q | Beta,D-mannosylqueosine |
| Cm | 2′-O-methylcytidine | Mcm5s2u | 5-methoxycarbonylmethyl-2- |
| | | | thiouridine |
| Cmnm5s2u | 5-carboxymethylaminomethyl- | Mcm5u | 5-methoxycarbonylmethyluridine |
| | 2-thioridine | | |
| Cmnm5u | 5-carboxymethylamino- | Mo5u | 5-methoxyuridine |
| | methyluridine | | |
| D | Dihydrouridine | Ms2i6a | 2-methylthio-N6-isopentenyladenosine |
| Fm | 2′-O-methylpseudouridine | Ms2t6a | N-((9-beta-D-ribofuranosyl-2-methyl- |
| | | | thiopurine-6-yl)carbamoyl)threonine |
| gal q | Beta,D-galactosylqueosine | Mt6a | N-((9-beta-D-ribofuranosylpurine-6-yl) |
| | | | N-methyl-carbamoyl)threonine |
| Gm | 2′-O-methylguanosine | Mv | Uridine-5-oxyacetic acid methylester |
| I | Inosine | o5u | Uridine-5-oxyacetic acid (v) |
| I6a | N6-isopentenyladenosine | Osyw | Wybutoxosine |
| m1a | 1-methyladenosine | P | Pseudouridine |
| m1f | 1-methylpseudouridine | Q | Queosine |
| m1g | 1-methylguanosine | s2c | 2-thiocytidine |
| m1I | 1-methylinosine | s2t | 5-methly-2-thiouridine |
| m22g | 2,2-dimethylguanosine | s2u | 2-thiouridine |
| m2a | 2-methyladenosine | s4u | 4-thiouridine |
| m2g | 2-methylguanosine | T | 5-methyluridine |
| m3c | 3-methylcytidine | t6a | N-((9-beta-D-ribofuranosylpurine-6- |
| | | | yl) carbamoyl)threonine |
| m5c | 5-methylcytidine | Tm | 2′-O-methyl-5-methyluridine |
| m6a | N6-methyladenosine | Um | 2′-O-methyluridine |
| m7g | 7-methylguanosine | Yw | Wybutosine |
| Mam5u | 5-methylaminomethyluridine | X | 3-(3-amino-3-carboxypropyl)uridine, |
| | | | (acp3)u |

[0153] VI. Recombinant Vectors, Host Cells and Expression

[0154] Recombinant vectors form an important further aspect of the present invention. The term “expression vector or construct” means any type of genetic construct containing a nucleic acid coding for a gene product in which part or all of the nucleic acid encoding sequence is capable of being transcribed. The transcript may be translated into a proteinaceous molecule, but it need not be, such as in the case of hCHT or mCHT antisense inhibitors. Thus, in certain embodiments, expression includes both transcription of a CHT gene and translation of a RNA into the CHT gene product. In other embodiments, expression only includes transcription of the nucleic acid, for example, to generate antisense constructs. The antisense construct can be, for example a CHT antisense nucleic acid. A recombinant vector can also be used for delivery of the hCHT or mCHT of the current invention.

[0155] Particularly useful vectors are contemplated to be those vectors in which the coding portion of the DNA segment, whether encoding a full length protein or smaller polypeptide or peptide, is positioned under the transcriptional control of a promoter. A “promoter” refers to a DNA sequence recognized by the synthetic machinery of the cell, or introduced synthetic machinery, required to initiate the specific transcription of a gene. The phrases “operatively positioned,” “under control” or “under transcriptional control” means that the promoter is in the correct location and orientation in relation to the nucleic acid to control RNA polymerase initiation and expression of the gene.

[0156] The promoter may be in the form of the promoter that is naturally associated with an CHT, or more particularly hCHT or mCHT gene, as may be obtained by isolating the 5′ non-coding sequences located upstream of the coding segment or exon, for example, using recombinant cloning and/or PCR™ technology, in connection with the compositions disclosed herein (PCR™ technology is disclosed in U.S. Pat. No. 4,683,202 and U.S. Pat. No. 4,682,195, each incorporated herein by reference).

[0157] In other embodiments, it is contemplated that certain advantages will be gained by positioning the coding DNA segment under the control of a recombinant, or heterologous, promoter. As used herein, a recombinant or heterologous promoter is intended to refer to a promoter that is not normally associated with an hCHT or mCHT gene in its natural environment. Such promoters may include promoters normally associated with other genes, and/or promoters isolated from any other bacterial, viral, eukaryotic, protist, or mammalian cell, and/or promoters made by the hand of man that are not “naturally occurring,” i e., containing different elements from different promoters, or mutations that increase, decrease, or alter expression.

[0158] Naturally, it will be important to employ a promoter that effectively directs the expression of the DNA segment in the cell type, organism, or even animal, chosen for expression. The use of promoter and cell type combinations for protein expression is generally known to those of skill in the art of molecular biology, for example, see Sambrook et al. (1989), incorporated herein by reference. The promoters employed may be constitutive, or inducible, and can be used under the appropriate conditions to direct high level expression of the introduced DNA segment, such as is advantageous in the large-scale production of recombinant proteins, polypeptides or peptides.

[0159] At least one module in a promoter generally functions to position the start site for RNA synthesis. The best known example of this is the TATA box, but in some promoters lacking a TATA box, such as the promoter for the mammalian terminal deoxynucleotidyl transferase gene and the promoter for the SV40 late genes, a discrete element overlying the start site itself helps to fix the place of initiation.

[0160] Additional promoter elements regulate the frequency of transcriptional initiation. Typically, these are located in the region 30-1 10 bp upstream of the start site, although a number of promoters have been shown to contain functional elements downstream of the start site as well. The spacing between promoter elements frequently is flexible, so that promoter function is preserved when elements are inverted or moved relative to one another. In the thymidine kinase promoter, the spacing between promoter elements can be increased to 50 base pairs apart before activity begins to decline. Depending on the promoter, it appears that individual elements can function either co-operatively or independently to activate transcription.

[0161] The particular promoter that is employed to control the expression of a nucleic acid is not believed to be critical, so long as it is capable of expressing the nucleic acid in the targeted cell. Thus, where a human cell is targeted, it is preferable to position the nucleic acid coding region adjacent to and under the control of a promoter that is capable of being expressed in a human cell. Generally speaking, such a promoter might include either a human or viral promoter.

[0162] In various other embodiments, the human cytomegalovirus (CMV) immediate early gene promoter, the SV40 early promoter and the Rous sarcoma virus long terminal repeat can be used to obtain high-level expression of the instant nucleic acids. The use of other viral or mammalian cellular or bacterial phage promoters which are well-known in the art to achieve expression are contemplated as well, provided that the levels of expression are sufficient for a given purpose. Tables 4 and 5 below list several elements/promoters which may be employed, in the context of the present invention, to regulate the expression of an hCHT or mCHT gene. This list is not intended to be exhaustive of all the possible elements involved in the promotion of expression but, merely, to be exemplary thereof.

[0163] Enhancers were originally detected as genetic elements that increased transcription from a promoter located at a distant position on the same molecule of DNA. This ability to act over a large distance had little precedent in classic studies of prokaryotic transcriptional regulation. Subsequent work showed that regions of DNA with enhancer activity are organized much like promoters. That is, they are composed of many individual elements, each of which binds to one or more transcriptional proteins.

[0164] The basic distinction between enhancers and promoters is operational. An enhancer region as a whole must be able to stimulate transcription at a distance; this need not be true of a promoter region or its component elements. On the other hand, a promoter must have one or more elements that direct initiation of RNA synthesis at a particular site and in a particular orientation, whereas enhancers lack these specificities. Promoters and enhancers are often overlapping and contiguous, often seeming to have a very similar modular organization.

[0165] Additionally any promoter/enhancer combination (as per the Eukaryotic Promoter Data Base EPDB, http://www.epd.isb-sib.ch/) could also be used to drive expression. Use of a T3, T7 or SP6 cytoplasmic expression system is another possible embodiment. Eukaryotic cells can support cytoplasmic transcription from certain bacterial promoters if the appropriate bacterial polymerase is provided, either as part of the delivery complex or as an additional genetic expression construct.

TABLE 4
Promoter and Enhancer Elements

| Promoter/Enhancer | References |
|---|---|
| Immunoglobulin Heavy Chain | Banerji et al., 1983; Gilles et al., 1983; Grosschedl and |
| | Baltimore, 1985; Atchinson and Perry, 1986, 1987; |
| | Imler et al., 1987; Weinberger et al., 1984; Kiledjian et |
| | al., 1988; Porton et al.; 1990 |
| Immunoglobulin Light Chain | Queen and Baltimore, 1983; Picard and Schaffner, 1984 |
| T-Cell Receptor | Luria et al., 1987; Winoto and Baltimore, 1989; Redondo |
| | et al.; 1990 |
| HLA DQ a and DQ β | Sullivan and Peterlin, 1987 |
| β-Interferon | Goodbourn et al., 1986; Fujita et al., 1987; Goodbourn |
| | and Maniatis, 1988 |
| Interleukin-2 | Greene et al., 1989 |
| Interleukin-2 Receptor | Greene et al., 1989; Lin et al., 1990 |
| MHC Class II 5 | Koch et al., 1989 |
| MHC Class II HLA-Dra | Sherman et al., 1989 |
| β-Actin | Kawamoto et al., 1988; Ng et al.; 1989 |
| Muscle Creatine Kinase | Jaynes et al., 1988; Horlick and Benfield, 1989; |
| | Johnson et al., 1989 |
| Prealbumin (Transthyretin) | Costa et al., 1988 |
| Elastase I | Ornitz et al., 1987 |
| Metallothionein | Karin et al., 1987; Culotta and Hamer, 1989 |
| Collagenase | Pinkert et al., 1987; Angel et al., 1987 |
| Albumin Gene | Pinkert et al, 1987; Tronche et al., 1989, 1990 |
| α-Fetoprotein | Godbout et al., 1988; Campere and Tilghman, 1989 |
| t-Globin | Bodine and Ley, 1987; Perez-Stable and Constantini, 1990 |
| β-Globin | Trudel and Constantini, 1987 |
| e-fos | |
| c-HA-ras | Deschamps et al., 1985 |
| Insulin | Edlund et al., 1985 |
| Neural Cell Adhesion | Hirsh et al., 1990 |
| Molecule (NCAM) | |
| α_{1-Antitrypain} | Latimer et al., 1990 |
| H2B (TH2B) Histone | Hwang et al., 1990 |
| Mouse or Type I Collagen | Ripe et al., 1989 |
| Glucose-Regulated Proteins | Chang et al., 1989 |
| (GRP94 and GRP78) | |
| Rat Growth Hormone | Larsen et al., 1986 |
| Human Serum Amyloid A (SAA) | Edbrooke et al., 1989 |
| Troponin I (TN I) | Yutzey et al., 1989 |
| Platelet-Derived Growth Factor | Pech et al., 1989 |
| Duchenne Muscular Dystrophy | Klamut et al., 1990 |
| SV40 | Banerji et al., 1981; Moreau et al., 1981; Sleigh and |
| | Lockett, 1985; Firak and Subramanian, 1986; Herr and |
| | Clarke, 1986; Imbra and Karin, 1986; Kadesch and Berg, |
| | 1986; Wang and Calame, 1986; Ondek et al., 1987; |
| | Kuhl et al., 1987; Schaffner et al., 1988 |
| Polyoma | Swartzendruber and Lehman, 1975; Vasseur et al., 1980; |
| | Katinka et al., 1980, 1981; Tyndell et al., 1981; |
| | Dandolo et al., 1983; de Villiers et al., 1984; Hen |
| | et al., 1986; Satake et al., 1988; Campbell and |
| | Villarreal, 1988 |
| Retroviruses | Kriegler and Botchan, 1982, 1983; Levinson et al., 1982; |
| | Kriegler et al., 1983, 1984a, b, 1988; Bosze et al., 1986; |
| | Miksicek et al., 1986; Celander and Haseltine, 1987; |
| | Thiesen et al., 1988; Celander et al., 1988; Choi et |
| | al., 1988; Reisman and Rotter, 1989 |
| Papilloma Virus | Campo et al., 1983; Lusky et al., 1983; Spandidos and |
| | Wilkie, 1983; Spalholz et al., 1985; Lusky and Botchan, |
| | 1986; Cripe et al., 1987; Gloss et al., 1987; Hirochika et |
| | al., 1987; Stephens and Hentschel, 1987 |
| Hepatitis B Virus | Bulla and Siddiqui, 1986; Jameel and Siddiqui, 1986; |
| | Shaul and Ben-Levy, 1987; Spandau and Lee, 1988; |
| | Vannice and Levinson, 1988 |
| Human Immunodeficiency | Muesing et al., 1987; Hauber and Cullan, 1988; |
| Virus | Jakobovits et al, 1988; Feng and Holland, 1988; |
| | Takebe et al., 1988; Rosen et al., 1988; Berkhout et |
| | al., 1989; Laspia et al., 1989; Sharp and Marciniak, 1989; |
| | Braddock et al., 1989 |
| Cytomegalovirus | Weber et al., 1984; Boshart et al., 1985; Foecking and |
| | Hofstetter, 1986 |
| Gibbon Ape Leukemia | Holbrook et al., 1987; Quinn et al., 1989 |
| Virus | |

[0166] TABLE 5
Inducible Elements

| Element | Inducer | References |
|---|---|---|
| MT II | Phorbol Ester | Palmiter et al., 1982; Haslinger |
| | (TFA) Heavy | and Karin, 1985; Searle et |
| | metals | al., 1985; Stuart et al., 1985; |
| | | Imagawa et al., 1987, Karin et |
| | | al., 1987; Angel et al., 1987b; |
| | | McNeall et al., 1989 |
| MMTV (mouse | Glucocorticoids | Huang et al., 1981; Lee et |
| mammary | | al., 1981; Majors and Varmus, |
| tumor virus) | | 1983; Chandler et al., 1983; |
| | | Lee et al., 1984; Ponta et |
| | | al., 1985; Sakai et al., 1988 |
| β-Interferon | Poly(rI)x | Tavernier et al., 1983 |
| | Poly(rc) | |
| Adenovirus 5 E2 | Ela | Imperiale and Nevins, 1984 |
| Collagenase | Phorbol Ester | Angel et al., 1987a |
| | (TPA) | |
| Stromelysin | Phorbol Ester | Angel et al., 1987b |
| | (TPA) | |
| SV40 | Phorbol Ester | Angel et al., 1987b |
| | (TPA) | |
| Murine MX Gene | Interferon, | |
| | Newcastle | |
| | Disease Virus | |
| GRP78 Gene | A23187 | Resendez et al., 1988 |
| α-2-Macroglobulin | IL-6 | Kunz et al., 1989 |
| Vimentin | Serum | Rittling et al., 1989 |
| MHC Class I | Interferon | Blanar et al., 1989 |
| Gene H-2κb | | |
| HSP70 | Ela, SV40 Large | Taylor et al., 1989; Taylor |
| | T Antigen | and Kingston, 1990a, b |
| Proliferin | Phorbol Ester- | Mordacq and Linzer, 1989 |
| | TPA | |
| Tumor Necrosis | FMA | Hensel et al., 1989 |
| Factor | | |
| Thyroid Stimulating | Thyroid Hormone | Chatterjee et al., 1989 |
| Hormone a Gene | | |

[0167] Turning to the expression of the hCHT or mCHT proteinaceous molecules of the present invention, once a suitable clone or clones have been obtained, whether they be cDNA based or genomic, one may proceed to prepare an expression system. The engineering of DNA segment(s) for expression in a prokaryotic or eukaryotic system may be performed by techniques generally known to those of skill in recombinant expression. It is believed that virtually any expression system may be employed in the expression of the proteinaceous molecules of the present invention.

[0168] Both cDNA and genomic sequences are suitable for eukaryotic expression, as the host cell will generally process the genomic transcripts to yield functional mRNA for translation into proteinaceous molecules. Generally speaking, it may be more convenient to employ as the recombinant gene a cDNA version of the gene. It is believed that the use of a cDNA version will provide advantages in that the size of the gene will generally be much smaller and more readily employed to transfect the targeted cell than will a genomic gene, which will typically be up to an order of magnitude or more larger than the cDNA gene. However, it is contemplated that a genomic version of a particular gene may be employed where desired.

[0169] In expression, one will typically include a polyadenylation signal to effect proper polyadenylation of the transcript. The nature of the polyadenylation signal is not believed to be crucial to the successful practice of the invention, and any such sequence may be employed. Preferred embodiments include the SV40 polyadenylation signal and the bovine growth hormone polyadenylation signal, convenient and known to function well in various target cells. Also contemplated as an element of the expression cassette is a terminator. These elements can serve to enhance message levels and to minimize read through from the cassette into other sequences.

[0170] a. Antisense and Ribozymes

[0171] In some embodiments of the invention, an antisense nucleic acid can be used as an hCHT or mCHT inhibitor. The term “antisense nucleic acid” is intended to refer to the oligonucleotides complementary to the base sequences of DNA and RNA. Antisense oligonucleotides, when introduced into a target cell, specifically bind to their target nucleic acid and interfere with transcription, RNA processing, transport, translation, and/or stability. Targeting double-stranded (ds) DNA with oligonucleotides leads to triple-helix formation; targeting RNA will lead to double-helix formation. An antisense nucleic acid may be complementary to SEQ ID NO:1 or SEQ ID NO:3, complementary to an CHT encoding sequence or to CHT non-coding sequences.

[0172] Targeting double-stranded (ds) DNA with polynucleotides leads to triple-helix formation; targeting RNA will lead to double-helix formation. Antisense polynucleotides, when introduced into a target cell, specifically bind to their target polynucleotide and interfere with transcription, RNA processing, transport, translation and/or stability. Antisense RNA constructs, or DNA encoding such antisense RNAs, may be employed to inhibit gene transcription or translation or both within a host cell, either in vitro or in vivo, such as within a host animal, including a human subject.

[0173] Antisense constructs may be designed to bind to the promoter and other control regions, exons, introns or even exon-intron boundaries (splice junctions) of a gene. It is contemplated that the most effective antisense constructs may include regions complementary to intron/exon splice junctions. Thus, antisense constructs with complementary regions within 50-200 bases of an intron-exon splice junction may be used. It has been observed that some exon sequences can be included in the construct without seriously affecting the target selectivity thereof The amount of exonic material included will vary depending on the particular exon and intron sequences used. One can readily test whether too much exon DNA is included simply by testing the constructs in vitro to determine whether normal cellular function is affected or whether the expression of related genes having complementary sequences is affected.

[0174] As stated above, “complementary” or “antisense” means polynucleotide sequences that are substantially complementary over their entire length and have very few base mismatches. For example, sequences of fifteen bases in length may be termed complementary when they have complementary nucleotides at thirteen or fourteen positions. Naturally, sequences which are completely complementary will be sequences which are entirely complementary throughout their entire length and have no base mismatches. Other sequences with lower degrees of homology also are contemplated. For example, an antisense construct which has limited regions of high homology, but also contains a non-homologous region (e.g., ribozyme) could be designed. These molecules, though having less than 50% homology, would bind to target sequences under appropriate conditions.

[0175] It may be advantageous to combine portions of genomic DNA with cDNA or synthetic sequences to generate specific constructs. For example, where an intron is desired in the ultimate construct, a genomic clone will need to be used. The cDNA or a synthesized polynucleotide may provide more convenient restriction sites for the remaining portion of the construct and, therefore, would be used for the rest of the sequence.

[0176] While all or part of the gene sequence may be employed in the context of antisense construction, statistically, any sequence 17 bases long should occur only once in the human genome and, therefore, suffice to specify a unique target sequence. Although shorter oligomers are easier to make and increase in vivo accessibility, numerous other factors are involved in determining the specificity of hybridization. Both binding affinity and sequence specificity of an oligonucleotide to its complementary target increases with increasing length. It is contemplated that oligonucleotides of 8, 9, 10, 11, 12, 13, 14, 15, 16, 17, 18, 19, 20 or more base pairs will be used. One can readily determine whether a given antisense nucleic acid is effective at targeting of the corresponding host cell gene simply by testing the constructs in vitro or in vivo to determine whether the endogenous gene's function is affected or whether the expression of related genes having complementary sequences is affected.

[0177] In certain embodiments, one may wish to employ antisense constructs which include other elements, for example, those which include C-5 propyne pyrimidines. Oligonucleotides which contain C-5 propyne analogues of uridine and cytidine have been shown to bind RNA with high affinity and to be potent antisense inhibitors of gene expression (Wagner et al, 1993).

[0178] As an alternative to targeted antisense delivery, targeted ribozymes may be used. The term “ribozyme” refers to an RNA-based enzyme capable of targeting and cleaving particular base sequences in oncogene DNA and RNA. Ribozymes either can be targeted directly to cells, in the form of RNA oligo-nucleotides incorporating ribozyme sequences, or introduced into the cell as an expression construct encoding the desired ribozymal RNA. Ribozymes may be used and applied in much the same way as described for antisense nucleic acids. Sequences for ribozymes may be included in the DNA template to eliminate undesired 5′ end sequences in RNAs generated through T7 RNA polymerase transcription.

[0179] Ribozymes are RNA-protein complexes that cleave nucleic acids in a site-specific fashion. Ribozymes have specific catalytic domains that possess endonuclease activity (Kim and Cech, 1987; Gerlack el al., 1987; Forster and Symons, 1987). For example, a large number of ribozymes accelerate phosphoester transfer reactions with a high degree of specificity, often cleaving only one of several phosphoesters in an oligonucleotide substrate (Cech et al., 1981; Michel and Westhof, 1990; Reinhold-Hurek and Shub, 1992). This specificity has been attributed to the requirement that the substrate bind via specific base-pairing interactions to the internal guide sequence (“IGS”) of the ribozyme prior to chemical reaction.

[0180] Ribozyme catalysis has primarily been observed as part of sequence specific cleavage/ligation reactions involving nucleic acids (Joyce, 1989; Cech et al., 1981). For example, U.S. Pat. No. 5,354,855 reports that certain ribozymes can act as endonucleases with a sequence specificity greater than that of known ribonucleases and approaching that of the DNA restriction enzymes. Thus, sequence-specific ribozyme-mediated inhibition of gene expression may be particularly suited to therapeutic applications (Scanlon et al., 1991; Sarver et al., 1990; Sioud et al., 1992) Recently, it was reported that ribozymes elicited genetic changes in some cell lines to which they were applied; the altered genes included the oncogenes H-ras, c-fos and genes of HIV. Most of this work involved the modification of a target mRNA, based on a specific mutant codon that is cleaved by a specific ribozyme. In light of the information included herein and the knowledge of one of ordinary skill in the art, the preparation and use of additional ribozymes that are specifically targeted to a given gene will now be straightforward.

[0181] Several different ribozyme motifs have been described with RNA cleavage activity (reviewed in Symons, 1992). Examples that would be expected to function equivalently for the up or down regulation of hCHTs and mCHTs include sequences from the Group I self-splicing introns including tobacco ringspot virus (Prody et al., 1986), avocado sunblotch viroid (Palukaitis et al, 1979; Symons, 1981), and Lucerne transient streak virus (Forster and Symons, 1987). Sequences from these and related viruses are referred to as hammerhead ribozymes based on a predicted folded secondary structure.

[0182] Other suitable ribozymes include sequences from RNase P with RNA cleavage activity (Yuan, et al., 1992; Yuan and Altman, 1994), hairpin ribozyme structures (Berzal-Herranz, et al., 1992; Chowrira et al., 1993) and hepatitis δ virus based ribozymes (Perrotta and Been, 1992). The general design and optimization of ribozyme directed RNA cleavage activity has been discussed in detail (Haseloff and Gerlach, 1988; Symons, 1992; Chowrira, et al., 1994; and Thompson, et al., 1995).

[0183] The other variable on ribozyme design is the selection of a cleavage site on a given target RNA. Ribozymes are targeted to a given sequence by virtue of annealing to a site by complementary base pair interactions. Two stretches of homology are required for this targeting. These stretches of homologous sequences flank the catalytic ribozyme structure defined above. Each stretch of homologous sequence can vary in length from 7 to 15 nucleotides. The only requirement for defining the homologous sequences is that, on the target RNA, they are separated by a specific sequence which is the cleavage site. For hammerhead ribozymes, the cleavage site is a dinucleotide sequence on the target RNA, uracil (U) followed by either an adenine, cytosine or uracil (A, C or U; Perriman, et al., 1992; Thompson, et al., 1995). The frequency of this dinucleotide occurring in any given RNA is statistically 3 out of 16. Therefore, for a given target messenger RNA of 1000 bases, 187 dinucleotide cleavage sites are statistically possible.

[0184] Designing and testing ribozymes for efficient cleavage of a target RNA is a process well known to those skilled in the art. Examples of scientific methods for designing and testing ribozymes are described by Chowrira et al. (1994) and Lieber and Strauss (1995), each incorporated by reference. The identification of operative and preferred sequences for use in hCHT- and mCHT-targeted ribozymes is simply a matter of preparing and testing a given sequence, and is a routinely practiced “screening” method known to those of skill in the art.

[0185] A specific initiation signal also may be required for efficient translation of coding sequences. These signals include the ATG initiation codon and adjacent sequences. Exogenous translational control signals, including the ATG initiation codon, may need to be provided. One of ordinary skill in the art would readily be capable of determining this and providing the necessary signals. It is well known that the initiation codon must be “in-frame” with the reading frame of the desired coding sequence to ensure translation of the entire insert. The exogenous translational control signals and initiation codons can be either natural or synthetic. The efficiency of expression may be enhanced by the inclusion of appropriate transcription enhancer elements.

[0186] It is proposed that CHT, or more particularly hCHT or mCHT may be co-expressed with other selected proteinaceous molecules, wherein the proteinaceous molecules may be co-expressed in the same cell or hCHT or mCHT gene may be provided to a cell that already has another selected proteinaceous molecule. Co-expression may be achieved by co-transfecting the cell with two distinct recombinant vectors, each bearing a copy of either of the respective DNAs. Alternatively, a single recombinant vector may be constructed to include the coding regions for both of the proteinaceous molecules, which could then be expressed in cells transfected with the single vector. In either event, the term “co-expression” herein refers to the expression of both the hCHT or mCHT gene and the other selected proteinaceous molecules in the same recombinant cell.

[0187] As used herein, the terms “engineered” and “recombinant” cells or host cells are intended to refer to a cell into which an exogenous DNA segment or gene, such as a cDNA or gene encoding hCHT or mCHT, has been introduced. Therefore, engineered cells are distinguishable from naturally occurring cells which do not contain a recombinantly introduced exogenous DNA segment or gene. Engineered cells are thus cells having a gene or genes introduced through the hand of man. Recombinant cells include those having an introduced cDNA or genomic gene, and also include genes positioned adjacent to a promoter not naturally associated with the particular introduced gene.

[0188] To express a recombinant hCHT or mCHT protein kinase, whether mutant or wild-type, in accordance with the present invention one would prepare an expression vector that comprises a wild-type, or mutant CHT proteinaceous molecule-encoding nucleic acid under the control of one or more promoters. To bring a coding sequence “under the control of” a promoter, one positions the 5′ end of the transcription initiation site of the transcriptional reading frame generally between about 1 and about 50 nucleotides “downstream” of (i.e., 3′ of) the chosen promoter. The “upstream” promoter directs transcription of the DNA and promotes expression of the encoded recombinant protein, polypeptide or peptide. This is the meaning of “recombinant expression” in this context.

[0189] Many standard techniques are available to construct expression vectors containing the appropriate nucleic acids and transcriptional/translational control sequences in order to achieve protein, polypeptide or peptide expression in a variety of host-expression systems. Cell types available for expression include, but are not limited to, bacteria, such as E. coli and B. subtilis, transformed with recombinant bacteriophage DNA, plasmid DNA or cosmid DNA expression vectors.

[0190] Certain examples of prokaryotic hosts are E. coli strain RR1, E. coli LE392, E. coli B, E. coli X 1776 (ATCC No. 31537) as well as E. coli W31 10 (F-, lambda-, prototrophic, ATCC No. 273325); bacilli such as Bacillus subtilis; and other enterobacteriaceae such as Salmonella typhimurium, Serratia marcescens, and various Pseudomonas species.

[0191] In general, plasmid vectors containing replicon and control sequences which are derived from species compatible with the host cell are used in connection with these hosts. The vector ordinarily carries a replication origin, as well as marking sequences which are capable of providing phenotypic selection in transformed cells. For example, E. coli is often transformed using derivatives of pBR322, a plasmid derived from an E. coli species. pBR322 contains genes for ampicillin and tetracycline resistance and thus provides easy means for identifying transformed cells. The pBR plasmid, or other microbial plasmid or phage must also contain, or be modified to contain, promoters which can be used by the microbial organism for expression of its own proteins.

[0192] In addition, phage vectors containing replicon and control sequences that are compatible with the host microorganism can be used as transforming vectors in connection with these hosts. For example, the phage lambda GEM™-11 may be utilized in making a recombinant phage vector which can be used to transform host cells, such as E. coli LE392.

[0193] Further useful vectors include pIN vectors (Inouyeet al., 1985); and pGEX vectors, for use in generating glutathione S-transferase (GST) soluble fusion proteins for later purification and separation or cleavage. Other suitable fusion proteins are those with β-galactosidase, ubiquitin, and the like.

[0194] Promoters that are most commonly used in recombinant DNA construction include the β-lactamase (penicillinase), lactose and tryptophan (trp) promoter systems. While these are the most commonly used, other microbial promoters have been discovered and utilized, and details concerning their nucleotide sequences have been published, enabling those of skill in the art to ligate them functionally with plasmid vectors.

[0195] The following details concerning recombinant protein production in bacterial cells, such as E. coli, are provided by way of exemplary information on recombinant protein production in general, the adaptation of which to a particular recombinant expression system will be known to those of skill in the art.

[0196] Bacterial cells, for example, E. coli, containing the expression vector are grown in any of a number of suitable media, for example, LB. The expression of the recombinant proteinaceous molecule may be induced, e.g., by adding IPTG or any appropriate inducer to the media or by switching incubation to a higher temperature, depending on the regulated promoter used. After culturing the bacteria for a further period, generally of between 2 and 24 hours, the cells are collected by centrifugation and washed to remove residual media.

[0197] The bacterial cells are then lysed, for example, by disruption in a cell homogenizer, by sonication or cell press and centrifuged to separate the dense inclusion bodies and cell membranes from the soluble cell components. This centrifugation can be performed under conditions whereby the dense inclusion bodies are selectively enriched by incorporation of sugars, such as sucrose, into the buffer and centrifugation at a selective speed.

[0198] If the recombinant proteinaceous molecule is expressed in the inclusion bodies, as is the case in many instances, these can be washed in any of several solutions to remove some of the contaminating host proteins, then solubilized in solutions containing high concentrations of urea (e.g., 8M) or chaotropic agents such as guanidine hydrochloride in the presence of reducing agents, such as β-mercaptoethanol or DTT (dithiothreitol).

[0199] Under some circumstances, it may be advantageous to incubate the proteinaceous molecule for several hours under conditions suitable for the proteinaceous molecule to undergo a refolding process into a conformation which more closely resembles that of the native proteinaceous molecule. Such conditions generally include low proteinaceous molecule concentrations, less than 500 mg/ml, low levels of reducing agent, concentrations of urea less than 2 M and often the presence of reagents such as a mixture of reduced and oxidized glutathione which facilitate the interchange of disulfide bonds within the proteinaceous molecule.

[0200] The refolding process can be monitored, for example, by SDS-PAGE, or with antibodies specific for the native molecule (which can be obtained from animals vaccinated with the native molecule or smaller quantities of recombinant proteinaceous molecule). Following refolding, the proteinaceous molecule can then be purified further and separated from the refolding mixture by chromatography on any of several supports including ion exchange resins, gel permeation resins or on a variety of affinity columns.

[0201] For expression in Saccharomyces, the plasmid YRp7, for example, is commonly used. This plasmid already contains the trpl gene which provides a selection marker for a mutant strain of yeast lacking the ability to grow in tryptophan, for example ATCC No. 44076 or PEP4-1. The presence of the trpl lesion as a characteristic of the yeast host cell genome then provides an effective environment for detecting transformation by growth in the absence of tryptophan.

[0202] Suitable promoter sequences in yeast vectors include the promoters for 3-phosphoglycerate kinase or other glycolytic enzymes, such as enolase, glyceraldehyde-3-phosphate-hCHT, glyceraldehyde-3-phosphate protein, hexokinase, pyruvate decarboxylase, phosphofructokinase, glucose-6-phosphate isomerase, 3-phosphoglycerate mutase, pyruvate kinase, triosephosphate isomerase, phosphoglucose isomerase, and glucokinase. In constructing suitable expression plasmids, the termination sequences associated with these genes are also ligated into the expression vector 3′ of the sequence desired to be expressed to provide polyadenylation of the mRNA and termination.

[0203] Other suitable promoters, which have the additional advantage of transcription controlled by growth conditions, include the promoter region for alcohol hCHT 2, isocytochrome C, acid phosphatase, degradative enzymes associated with nitrogen metabolism, and the aforementioned glyceraldehyde-3-phosphate-hCHT, and enzymes responsible for maltose and galactose utilization.

[0204] In addition to micro-organisms, cultures of cells derived from multicellular organisms may also be used as hosts. In principle, any such cell culture is workable, whether from vertebrate or invertebrate culture. In addition to mammalian cells, these include insect cell systems infected with recombinant virus expression vectors (e.g., baculovirus); and plant cell systems infected with recombinant virus expression vectors (e.g., cauliflower mosaic virus, CaMV; tobacco mosaic virus, TMV) or transformed with recombinant plasmid expression vectors (e.g., Ti plasmid) containing one or more hCHT or mCHT coding sequences.

[0205] Examples of useful mammalian host cell lines are VERO and HeLa cells, Chinese hamster ovary (CHO) cell lines, W138, BHK, COS-7, 293, HepG2, 3T3, RIN and MDCK cell lines. In addition, a host cell strain may be chosen that modulates the expression of the inserted sequences, or modifies and processes the gene product in the specific fashion desired. Such modifications (e.g., glycosylation) and processing (e.g., cleavage) of proteinaceous products may be important for the function of the proteinaceous molecule.

[0206] Different host cells have characteristic and specific mechanisms for the post-translational processing and modification of proteinaceous molecules. Appropriate cells lines or host systems can be chosen to ensure the correct modification and processing of the foreign proteinaceous molecule expressed.

[0207] Expression vectors for use in mammalian cells ordinarily include an origin of replication (as necessary), a promoter located in front of the gene to be expressed, along with any necessary ribosome binding sites, RNA splice sites, polyadenylation site, and transcriptional terminator sequences. The origin of replication may be provided either by construction of the vector to include an exogenous origin, such as may be derived from SV40 or other viral (e.g., Polyoma, Adeno, VSV, BPV) source, or may be provided by the host cell chromosomal replication mechanism. If the vector is integrated into the host cell chromosome, the latter is often sufficient.

[0208] The promoters may be derived from the genome of mammalian cells (e.g., metallothionein promoter) or from mammalian viruses (e.g., the adenovirus late promoter; the vaccinia virus 7.5K promoter). Further, it is also possible, and may be desirable, to utilize promoter or control sequences normally associated with the hCHT or mCHT gene, provided such control sequences are compatible with the host cell systems.

[0209] A number of viral-based expression systems may be utilized, for example, commonly used promoters are derived from polyoma, Adenovirus 2, and most frequently Simian Virus 40 (SV40). The early and late promoters of SV40 virus are particularly useful because both are obtained easily from the virus as a fragment which also contains the SV40 viral origin of replication. Smaller or larger SV40 fragments may also be used, provided there is included the approximately 250 bp sequence extending from the HindIII site toward the BglI site located in the viral origin of replication.

[0210] In cases where an adenovirus is used as an expression vector, the coding sequences may be ligated to an adenovirus transcription/translation control complex, e.g., the late promoter and tripartite leader sequence. This chimeric gene may then be inserted in the adenovirus genome by in vitro or in vivo recombination. Insertion in a non-essential region of the viral genome (e.g., region E1, E3, or E4) will result in a recombinant virus that is viable and capable of expressing hCHT or mCHT in infected hosts.

[0211] Specific initiation signals may also be required for efficient translation of hCHT or mCHT protein, polypeptide or peptide coding sequences. These signals include the ATG initiation codon and adjacent sequences. Exogenous translational control signals, including the ATG initiation codon, may additionally need to be provided. One of ordinary skill in the art would readily be capable of determining this and providing the necessary signals. It is well known that the initiation codon must be in-frame (or in-phase) with the reading frame of the desired coding sequence to ensure translation of the entire insert. These exogenous translational control signals and initiation codons can be of a variety of origins, both natural and synthetic. The efficiency of expression may be enhanced by the inclusion of appropriate transcription enhancer elements and transcription terminators.

[0212] In eukaryotic expression, one will also typically desire to incorporate into the transcriptional unit an appropriate polyadenylation site (e.g., 5′-AATAAA-3′) if one was not contained within the original cloned segment. Typically, the poly A addition site is placed about 30 to 2000 nucleotides “downstream” of the termination site of the proteinaceous molecule at a position prior to transcription termination.

[0213] For long-term, high-yield production of a recombinant hCHT or mCHT protein, polypeptide or peptide, stable expression is preferred. For example, cell lines that stably express constructs encoding an hCHT or mCHT protein, polypeptide or peptide may be engineered. Rather than using expression vectors that contain viral origins of replication, host cells can be transformed with vectors controlled by appropriate expression control elements (e.g., promoter, enhancer, sequences, transcription terminators, polyadenylation sites, etc.), and a selectable marker. Following the introduction of foreign DNA, engineered cells may be allowed to grow for 1-2 days in an enriched media, and then are switched to a selective media. The selectable marker in the recombinant plasmid confers resistance to the selection and allows cells to stably integrate the plasmid into their chromosomes and grow to form foci which in turn can be cloned and expanded into cell lines.

[0214] A number of selection systems may be used, including, but not limited to, the herpes simplex virus thymidine kinase (tk), hypoxanthine-guanine phosphoribosyltransferase (hgprt) and adenine phosphoribosyltransferase (aprt) genes, in tk⁻, hgprt⁻ or aprt⁻0 cells, respectively. Also, antimetabolite resistance can be used as the basis of selection for dihydrofolate reductase (dhfr), that confers resistance to methotrexate; gpt, that confers resistance to mycophenolic acid; neomycin (neo), that confers resistance to the aminoglycoside G-418; and hygromycin (hygro), that confers resistance to hygromycin.

[0215] Animal cells can be propagated in vitro in two modes: as non-anchorage dependent cells growing in suspension throughout the bulk of the culture or as anchorage-dependent cells requiring attachment to a solid substrate for their propagation (i.e., a monolayer type of cell growth).

[0216] Non-anchorage dependent or suspension cultures from continuous established cell lines are the most widely used means of large scale production of cells and cell products. However, suspension cultured cells have limitations, such as tumorigenic potential and lower proteinaceous molecule production than adherent cells.

[0217] Large scale suspension culture of mammalian cells in stirred tanks is a common method for production of recombinant proteinaceous molecules. Two suspension culture reactor designs are in wide use the stirred reactor and the airlift reactor. The stirred design has successfully been used on an 8000 liter capacity for the production of interferon. Cells are grown in a stainless steel tank with a height-to-diameter ratio of 1:1 to 3:1. The culture is usually mixed with one or more agitators, based on bladed disks or marine propeller patterns. Agitator systems offering less shear forces than blades have been described. Agitation may be driven either directly or indirectly by magnetically coupled drives. Indirect drives reduce the risk of microbial contamination through seals on stirrer shafts.

[0218] The airlift reactor, described for microbial fermentation and later adapted for mammalian culture, relies on a gas stream to both mix and oxygenate the culture The gas stream enters a riser section of the reactor and drives circulation. Gas disengages at the culture surface, causing denser liquid free of gas bubbles to travel downward in the downcomer section of the reactor. The main advantage of this design is the simplicity and lack of need for mechanical mixing. Typically, the height-to-diameter ratio is 10:1. The airlift reactor scales up relatively easily, has good mass transfer of gases and generates relatively low shear forces.

[0219] It is contemplated that the hCHT or mCHT proteins, polypeptides or peptides of the invention may be “overexpressed,” i.e., expressed in increased levels relative to its natural expression in cells. Such overexpression may be assessed by a variety of methods, including radio-labeling and/or proteinaceous molecule purification. However, simple and direct methods are preferred, for example, those involving SDS/PAGE and proteinaceous composition staining or western blotting, followed by quantitative analyses, such as densitometric scanning of the resultant gel or blot. A specific increase in the level of the recombinant protein, polypeptide or peptide in comparison to the level in natural cells is indicative of overexpression, as is a relative abundance of the specific proteinaceous molecule in relation to the other proteins produced by the host cell and, e.g., visible on a gel.

[0220] VII. Methods of Gene Transfer

[0221] In order to mediate the effect of transgene expression in a cell, it will be necessary to transfer the expression constructs (e.g., a therapeutic construct) of the present invention into a cell. Such transfer may employ viral or non-viral methods of gene transfer. This section provides a discussion of methods and compositions of gene or nucleic acid transfer, including transfer of antisense sequences.

[0222] The hCHT or mCHT genes are incorporated into a viral vector to mediate gene transfer to a cell. Additional expression constructs encoding other therapeutic agents as described herein may also be transferred via viral transduction using infectious viral particles, for example, by transformation with an adenovirus vector of the present invention. Alternatively, a retrovirus, bovine papilloma virus, an adeno-associated virus (AAV), a lentiviral vector, a vaccinia virus, a polyoma virus, or an infective virus that has been engineered to express a specific binding ligand may be used. Similarly, nonviral methods which include, but are not limited to, direct delivery of DNA such as by injection, electroporation, calcium phosphate precipitation, liposome mediated transfection, and microprojectile bombardment may be employed. Thus, in one example, viral infection of cells is used in order to deliver therapeutically significant genes to a cell. Typically, the virus simply will be exposed to the appropriate host cell under physiologic conditions, permitting uptake of the virus.

[0223] a. Adenoviral Vectors

[0224] A particular method for delivery of the expression constructs for hCHT or mCHT inhibition involves the use of an adenovirus expression vector. Although adenovirus vectors are known to have a low capacity for integration into genomic DNA, this feature is counterbalanced by the high efficiency of gene transfer afforded by these vectors.

[0225] “Adenovirus expression vector” is meant to include those constructs containing adenovirus sequences sufficient to (a) support packaging of the construct and/or (b) to ultimately express a tissue and/or cell-specific construct that has been cloned therein.

[0226] The expression vector comprises a genetically engineered form of adenovirus. Knowledge of the genetic organization and/or adenovirus, a 36 kb, linear, double-stranded DNA virus, allows substitution of large pieces of adenoviral DNA with foreign sequences up to 7 kb (Grunhaus and/or Horwitz, 1992). In contrast to retrovirus, the adenoviral infection of host cells does not result in chromosomal integration because adenoviral DNA can replicate in an episomal manner without potential genotoxicity. Also, adenoviruses are structurally stable, and/or no genome rearrangement has been detected after extensive amplification.

[0227] Adenovirus is particularly suitable for use as a gene transfer vector because of its mid-sized genome, ease of manipulation, high titer, wide target-cell range and/or high infectivity. Both ends of the viral genome contain 100-200 base pair inverted repeats (ITRs), which are cis elements necessary for viral DNA replication and/or packaging. The early (E) and/or late (L) regions of the genome contain different transcription units that are divided by the onset of viral DNA replication. The E1 region (E1A and/or E1B) encodes proteins responsible for the regulation of transcription of the viral genome and/or a few cellular genes. The expression of the E2 region (E2A and/or E2B) results in the synthesis of the proteins for viral DNA replication. These proteins are involved in DNA replication, late gene expression and/or host cell shut-off (Renan, 1990). The products of the late genes, including the majority of the viral capsid proteins, are expressed only after significant processing of a single primary transcript issued by the major late promoter (MLP). The MLP (located at 16.8 m.u.) is particularly efficient during the late phase of infection, and/or all the mRNA's issued from this promoter possess a 5′-tripartite leader (TPL) sequence which makes them preferred mRNA's for translation.

[0228] In a current system, recombinant adenovirus is generated from homologous recombination between shuttle vector and/or provirus vector. Due to the possible recombination between two proviral vectors, wild-type adenovirus may be generated from this process. Therefore, it is critical to isolate a single clone of virus from an individual plaque and/or examine its genomic structure.

[0229] Generation and/or propagation of the current adenovirus vectors, which are replication deficient, depend on a unique helper cell line, designated 293, which was transformed from human embryonic kidney cells by Ad5 DNA fragments and/or constitutively expresses E1 proteins (E1A and/or E1B; Graham et al., 1977). Since the E3 region is dispensable from the adenovirus genome (Jones and/or Shenk, 1978), the current adenovirus vectors, with the help of 293 cells, carry foreign DNA in either the E 1, the D3 and/or both regions (Graham and/or Prevec, 1991). Recently, adenoviral vectors comprising deletions in the E4 region have been described (U.S. Pat. No. 5,670,488, incorporated herein by reference).

[0230] In nature, adenovirus can package approximately 105% of the wild-type genome (Ghosh-Choudhury et al., 1987), providing capacity for about 2 extra kb of DNA. Combined with the approximately 5.5 kb of DNA that is replaceable in the E1 and/or E3 regions, the maximum capacity of the current adenovirus vector is under 7.5 kb, and/or about 15% of the total length of the vector. More than 80% of the adenovirus viral genome remains in the vector backbone.

[0231] Helper cell lines may be derived from human cells such as embryonic kidney cells, muscle cells, hematopoietic cells and/or other embryonic mesenchymal and/or epithelial cells. Alternatively, the helper cells may be derived from the cells of other mammalian species that are permissive for human adenovirus. Such cells include, e.g., Vero cells and/or other monkey embryonic mesenchymal and/or epithelial cells.

[0232] Recently, Racher et al. (1995) disclosed improved methods for culturing 293 cells and/or propagating adenovirus. In one format, natural cell aggregates are grown by inoculating individual cells into 1 liter siliconized spinner flasks (Techne, Cambridge, UK) containing 100-200 ml of medium. Following stirring at 40 rpm, the cell viability is estimated with trypan blue. In another format, Fibra-Cel microcarriers (Bibby Sterlin, Stone, UK) (5 g/l) is employed as follows. A cell inoculum, resuspended in 5 ml of medium, is added to the carrier (50 ml) in a 250 ml Erlenmeyer flask and/or left stationary, with occasional agitation, for 1 to 4 h. The medium is then replaced with 50 ml of fresh medium and/or shaking initiated. For virus production, cells are allowed to grow to about 80% confluence, after which time the medium is replaced (to 25% of the final volume) and/or adenovirus added at an MOI of 0.05. Cultures are left stationary overnight, following which the volume is increased to 100% and/or shaking commenced for another 72 h.

[0233] Other than the requirement that the adenovirus vector be replication defective, and/or at least conditionally defective, the nature of the adenovirus vector is not believed to be crucial to the successful practice of the invention. The adenovirus may be of any of the 42 different known serotypes and/or subgroups A-F. Adenovirus type 5 of subgroup C is the preferred starting material in order to obtain the conditional replication-defective adenovirus vector for use in the present invention. This is because Adenovirus type 5 is a adenovirus about which a great deal of biochemical and/or genetic information is known, and/or it has historically been used for most constructions employing adenovirus as a vector.

[0234] As stated above, the typical vector according to the present invention is replication defective and/or will not have an adenovirus El region. Thus, it will be most convenient to introduce the transforming construct at the position from which the E1-coding sequences have been removed. However, the position of insertion of the construct within the adenovirus sequences is not critical to the invention. The polynucleotide encoding the gene of interest may also be inserted in lieu of the deleted E3 region in E3 replacement vectors as described by Karlsson et al. (1986) and/or in the E4 region where a helper cell line and/or helper virus complements the E4 defect.

[0235] Adenovirus growth and/or manipulation is known to those of skill in the art, and/or exhibits broad host range in vitro and/or in vivo. This group of viruses can be obtained in high titers, e.g., 10⁹ to 10¹¹ plaque-forming units per ml, and/or they are highly infective. The life cycle of adenovirus does not require integration into the host cell genome. The foreign genes delivered by adenovirus vectors are episomal and, therefore, have low genotoxicity to host cells. No side effects have been reported in studies of vaccination with wild-type adenovirus (Couch et al., 1963; Top et al., 1971), demonstrating their safety and/or therapeutic potential as in vivo gene transfer vectors.

[0236] Adenovirus vectors have been used in eukaryotic gene expression (Levrero et al., 1991; Gomez-Foix et al., 1992) and/or vaccine development (Grunhaus et al., 1992; Horwitz, 1992; Graham et al., 1992; Prevec, 1992). Recently, animal studies suggested that recombinant adenovirus could be used for gene therapy (Stratford-Perricaudet, 1991; Perricaudet, 1991a; Stratford-Perricaudet et al., 1991b; Rich et al., 1993). Studies in administering recombinant adenovirus to different tissues include trachea instillation (Rosenfeld et al., 1991; Rosenfeld et al., 1992), muscle injection (Ragot et al., 1993), peripheral intravenous injections (Herz, 1993 Gerard, 1993) and/or stereotactic inoculation into the brain (Le Gal La Salle et al., 1993). Recombinant adenovirus and/or adeno-associated virus (see below) can both infect and/or transduce non-dividing hyman primary cells.

[0237] b. AA V Vectors

[0238] Adeno-associated virus (AAV) is an attractive vector system for use in the cell transduction of the present invention as it has a high frequency of integration and/or it can infect nondividing cells, thus making it useful for delivery of genes into mammalian cells, for example, in tissue culture (Muzyczka, 1992) and/or in vivo. AAV has a broad host range for infectivity (Tratschin et al., 1984; Laughlin et al., 1986; Lebkowski et al., 1988; McLaughlin et al., 1988). Details concerning the generation and/or use of rAAV vectors are described in U.S. Pat. No. 5,139,941 and/or U.S. Pat. No. 4,797,368, each incorporated herein by reference.

[0239] Studies demonstrating the use of AAV in gene delivery include LaFace et al. (1988); Zhou et al. (1993); Flotte et al. (1993); and/or Walsh et al. (1994). Recombinant AAV vectors have been used successfully for in vitro and/or in vivo transduction of marker genes (Kaplitt et al., 1994; Lebkowski et al., 1988; Samulski et al., 1989; Yoder et al., 1994; Zhou et al., 1994; Hermonat, 1984; Muzyczka, 1984; Tratschin et al., 1985; McLaughlin et al., 1988) and/or genes involved in human diseases (Flotte et al., 1992; Luo et al., 1994; Ohi et al., 1990; Walsh et al., 1994; Wei et al., 1994).

[0240] AAV is a dependent parvovirus in that it requires coinfection with another virus (either adenovirus and/or a member of the herpes virus family) to undergo a productive infection in cultured cells (Muzyczka, 1992). In the absence of coinfection with helper virus, the wild type AAV genome integrates through its ends into human chromosome 19 where it resides in a latent state as a provirus (Kotin et al., 1990; Samulski et al., 1991). rAAV, however, is not restricted to chromosome 19 for integration unless the AAV Rep protein is also expressed (Shelling, 1994; Smith, 1994). When a cell carrying an AAV provirus is superinfected with a helper virus, the AAV genome is “rescued” from the chromosome and/or from a recombinant plasmid, and/or a normal productive infection is established (Samulski et al., 1989; McLaughlin et al., 1988; Kotin et al., 1990; Muzyczka, 1992).

[0241] Typically, recombinant AAV (rAAV) virus is made by cotransfecting a plasmid containing the gene of interest flanked by the two AAV terminal repeats (McLaughlin et al., 1988; Samulski et al., 1989; each incorporated herein by reference) and/or an expression plasmid containing the wild type AAV coding sequences without the terminal repeats, for example pIM45 (McCarty et al., 1991; incorporated herein by reference). The cells are also infected and/or transfected with adenovirus and/or plasmids carrying the adenovirus genes required for AAV helper function. rAAV virus stocks made in such fashion are contaminated with adenovirus which must be physically separated from the rAAV particles (for example, by cesium chloride density centrifugation). Alternatively, adenovirus vectors containing the AAV coding regions and/or cell lines containing the AAV coding regions and/or some and/or all of the adenovirus helper genes could be used (Yang et al., 1994; Clark et al., 1995). Cell lines carrying the rAAV DNA as an integrated provirus can also be used (Flotte et al., 1995).

[0242] c. Retroviral Vectors

[0243] Retroviruses have promise as gene delivery vectors due to their ability to integrate their genes into the host genome, transferring a large amount of foreign genetic material, infecting a broad spectrum of species and/or cell types and/or of being packaged in special cell-lines (Miller, 1992).

[0244] The retroviruses are a group of single-stranded RNA viruses characterized by an ability to convert their RNA to double-stranded DNA in infected cells by a process of reverse-transcription (Coffin, 1990). The resulting DNA then stably integrates into cellular chromosomes as a provirus and/or directs synthesis of viral proteins. The integration results in the retention of the viral gene sequences in the recipient cell and/or its descendants. The retroviral genome contains three genes, gag, pol, and/or env that code for capsid proteins, polymerase enzyme, and/or envelope components, respectively. A sequence found upstream from the gag gene contains a signal for packaging of the genome into virions. Two long terminal repeat (LTR) sequences are present at the 5′ and/or 3′ ends of the viral genome. These contain strong promoter and/or enhancer sequences and/or are also required for integration in the host cell genome (Coffin, 1990).

[0245] In order to construct a retroviral vector, a nucleic acid encoding a gene of interest is inserted into the viral genome in the place of certain viral sequences to produce a virus that is replication-defective. In order to produce virions, a packaging cell line containing the gag, pol, and/or env genes but without the LTR and/or packaging components is constructed (Mann et al., 1983). When a recombinant plasmid containing a cDNA, together with the retroviral LTR and/or packaging sequences is introduced into this cell line (by calcium phosphate precipitation for example), the packaging sequence allows the RNA transcript of the recombinant plasmid to be packaged into viral particles, which are then secreted into the culture media (Nicolas and/or Rubenstein, 1988; Temin, 1986; Mann et al., 1983). The media containing the recombinant retroviruses is then collected, optionally concentrated, and/or used for gene transfer. Retroviral vectors are able to infect a broad variety of cell types. However, integration and/or stable expression require the division of host cells (Paskind et al., 1975).

[0246] Concern with the use of defective retrovirus vectors is the potential appearance of wild-type replication-competent virus in the packaging cells. This can result from recombination events in which the intact sequence from the recombinant virus inserts upstream from the gag, pol, env sequence integrated in the host cell genome. However, new packaging cell lines are now available that should greatly decrease the likelihood of recombination (Markowitz et al., 1988; Hersdorffer et al., 1990).

[0247] Gene delivery using second generation retroviral vectors has been reported. Kasahara et al. (1994) prepared an engineered variant of the Moloney murine leukemia virus, that normally infects only mouse cells, and/or modified an envelope protein so that the virus specifically bound to, and/or infected cells bearing the erythropoietin (EPO) receptor. This was achieved by inserting a portion of the EPO sequence into an envelope protein to create a chimeric protein with a new binding specificity.

[0248] d. Herpesvirus

[0249] Because herpes simplex virus (HSV) is neurotropic, it has generated considerable interest in treating nervous system disorders. Moreover, the ability of HSV to establish latent infections in non-dividing neuronal cells without integrating in to the host cell chromosome or otherwise altering the host cell's metabolism, along with the existence of a promoter that is active during latency makes HSV an attractive vector. And though much attention has focused on the neurotropic applications of HSV, this vector also can be exploited for other tissues given its wide host range.

[0250] Another factor that makes HSV an attractive vector is the size and organization of the genome. Because HSV is large, incorporation of multiple genes or expression cassettes is less problematic than in other smaller viral systems. In addition, the availability of different viral control sequences with varying performance (temporal, strength, etc.) makes it possible to control expression to a greater extent than in other systems. It also is an advantage that the virus has relatively few spliced messages, further easing genetic manipulations.

[0251] HSV also is relatively easy to manipulate and can be grown to high titers. Thus, delivery is less of a problem, both in terms of volumes needed to attain sufficient MOI and in a lessened need for repeat dosings. For a review of HSV as a gene therapy vector, see (Glorioso et al., 1995).

[0252] HSV, designated with subtypes 1 and 2, are enveloped viruses that are among the most common infectious agents encountered by humans, infecting millions of human subjects worldwide. The large, complex, double-stranded DNA genome encodes for dozens of different gene products, some of which derive from spliced transcripts. In addition to virion and envelope structural components, the virus encodes numerous other proteins including a protease, a ribonucleotide reductase, a DNA polymerase, a ssDNA binding protein, a helicase/primase, a DNA dependent ATPase, dUTPase and others.

[0253] HSV genes from several groups whose expression is coordinately regulated and sequentially ordered in a cascade fashion (Honess and Roizman, 1974; Honess and Roizman, 1975; Roizman and Sears, 1995). The expression of α genes, the first set of genes to be expressed after infection, is enhanced by the virion protein number 16, or α-transducing factor (Post et al., 1981; Batterson and Roizman, 1983; Campbell et al., 1983). The expression of β genes requires functional a gene products, most notably ICP4, which is encoded by the α4 gene (DeLuca et al., 1985). γ genes, a heterogeneous group of genes encoding largely virion structural proteins, require the onset of viral DNA synthesis for optimal expression (Holland et al., 1980).

[0254] In line with the complexity of the genome, the life cycle of HSV is quite involved. In addition to the lytic cycle, which results in synthesis of virus particles and, eventually, cell death, the virus has the capability to enter a latent state in which the genome is maintained in neural ganglia until some as of yet undefined signal triggers a recurrence of the lytic cycle. Avirulent variants of HSV have been developed and are readily available for use in gene therapy contexts (U.S. Pat. No. 5,672,344).

[0255] e. Lentiviral Vectors

[0256] Lentiviruses are complex retroviruses, which, in addition to the common retroviral genes gag, pol, and env, contain other genes with regulatory or structural function. The higher complexity enables the virus to modulate its life cycle, as in the course of latent infection. Some examples of lentivirus include the Human Immunodeficiency Viruses: HIV-1, 1HV-2 and the Simian Immunodeficiency Virus: SIV. Lentiviral vectors have been generated by multiply attenuating the HIV virulence genes, for example, the genes env, vif vpr, vpu and nef are deleted making the vector biologically safe.

[0257] Recombinant lentiviral vectors are capable of infecting non-dividing cells and can be used for both in vivo and ex vivo gene transfer and expression of nucleic acid sequences. The lentiviral genome and the proviral DNA have the three genes found in retroviruses: gag, pol and env, which are flanked by two long terminal repeat (LTR) sequences. The gag gene encodes the internal structural (matrix, capsid and nucleocapsid) proteins; the pol gene encodes the RNA-directed DNA polymerase (reverse transcriptase), a protease and an integrase; and the env gene encodes viral envelope glycoproteins. The 5′ and 3‘LTR’s serve to promote transcription and polyadenylation of the virion RNA's. The LTR contains all other cis-acting sequences necessary for viral replication. Lentiviruses have additional genes including vif vpr, tat, rev, vpu, nef and vpx.

[0258] Adjacent to the 5′ LTR are sequences necessary for reverse transcription of the genome (the tRNA primer binding site) and for efficient encapsidation of viral RNA into particles (the Psi site). If the sequences necessary for encapsidation (or packaging of retroviral RNA into infectious virions) are missing from the viral genome, the cis defect prevents encapsidation of genomic RNA. However, the resulting mutant remains capable of directing the synthesis of all virion proteins.

[0259] Lentiviral vectors are known in the art, see Naldini et al., (1996); Zufferey et al, (1997), U.S. Pat. Nos. 6,013,516 and 5,994,136. In general, the vectors are plasmid-based or virus-based, and are configured to carry the essential sequences for incorporating foreign nucleic acid, for selection and for transfer of the nucleic acid into a host cell. The gag, pol and env genes of the vectors of interest also are known in the art. Thus, the relevant genes are cloned into the selected vector and then used to transform the target cell of interest.

[0260] Recombinant lentivirus capable of infecting a non-dividing cell wherein a suitable host cell is transfected with two or more vectors carrying the packaging functions, namely gag, pol and env, as well as rev and tat is described in U.S. Pat. No. 5,994,136, incorporated herein by reference. This describes a first vector that can provide a nucleic acid encoding a viral gag and a pol gene and another vector that can provide a nucleic acid encoding a viral env to produce a packaging cell. Introducing a vector providing a heterologous gene into that packaging cell yields a producer cell which releases infectious viral particles carrying the foreign gene of interest. The env preferably is an amphotropic envelope protein which allows transduction of cells of human and other species.

[0261] One may target the recombinant virus by linkage of the envelope protein with an antibody or a particular ligand for targeting to a receptor of a particular cell-type. By inserting a sequence (including a regulatory region) of interest into the viral vector, along with another gene which encodes the ligand for a receptor on a specific target cell, for example, the vector is now target-specific.

[0262] The vector providing the viral env nucleic acid sequence is associated operably with regulatory sequences, e.g., a promoter or enhancer. The regulatory sequence can be any eukaryotic promoter or enhancer, including for example, the Moloney murine leukemia virus promoter-enhancer element, the human cytomegalovirus enhancer or the vaccinia P7.5 promoter. In some cases, such as the Moloney murine leukemia virus promoter-enhancer element, the promoter-enhancer elements are located within or adjacent to the LTR sequences.

[0263] The heterologous or foreign nucleic acid sequence is linked operably to a regulatory nucleic acid sequence. Preferably, the heterologous sequence is linked to a promoter, resulting in a chimeric gene. The heterologous nucleic acid sequence may also be under control of either the viral LTR promoter-enhancer signals or of an internal promoter, and retained signals within the retroviral LTR can still bring about efficient expression of the transgene. Marker genes may be utilized to assay for the presence of the vector, and thus, to confirm infection and integration. The presence of a marker gene ensures the selection and growth of only those host cells which express the inserts. Typical selection genes encode proteins that confer resistance to antibiotics and other toxic substances, e.g., histidinol, puromycin, hygromycin, neomycin, methotrexate, etc. and cell surface markers.

[0264] The vectors are introduced via transfection or infection into the packaging cell line. The packaging cell line produces viral particles that contain the vector genome. Methods for transfection or infection are well known by those of skill in the art. After cotransfection of the packaging vectors and the transfer vector to the packaging cell line, the recombinant virus is recovered from the culture media and titered by standard methods used by those of skill in the art. Thus, the packaging constructs can be introduced into human cell lines by calcium phosphate transfection, lipofection or electroporation, generally together with a dominant selectable marker, such as neo, DHFR, Gln synthetase or ADA, followed by selection in the presence of the appropriate drug and isolation of clones. The selectable marker gene can be linked physically to the packaging genes in the construct.

[0265] f. Vaccinia Virus

[0266] Vaccinia virus vectors have been used extensively because of the ease of their construction, relatively high levels of expression obtained, wide host range and large capacity for carrying DNA. Vaccinia contains a linear, double-stranded DNA genome of about 186 kb that exhibits a marked “A-T” preference. Inverted terminal repeats of about 10.5 kb flank the genome. The majority of essential genes appear to map within the central region, which is most highly conserved among poxyiruses. Estimated open reading frames in vaccinia virus number from 150 to 200. Although both strands are coding, extensive overlap of reading frames is not common.

[0267] At least 25 kb can be inserted into the vaccinia virus genome (Smith and Moss, 0.1983). Prototypical vaccinia vectors contain transgenes inserted into the viral thymidine kinase gene via homologous recombination. Vectors are selected on the basis of a tk-phenotype. Inclusion of the untranslated leader sequence of encephalomyocarditis virus, the level of expression is higher than that of conventional vectors, with the transgenes accumulating at 10% or more of the infected cell's protein in 24 h (Elroy-Stein et al, 1989).

[0268] g. Polyoma Viruses

[0269] The empty capsids of papovaviruses, such as the mouse polyoma virus, have received attention as possible vectors for gene transfer (Barr et al., 1979), first described the use of polyoma empty when polyoma DNA and purified empty capsids were incubated in a cell-free system. The DNA of the new particle was protected from the action of pancreatic DNase. Slilaty and Aposhian (1983) described the use of those reconstituted particles for transferring a transforming polyoma DNA fragment to rat Fill cells. The empty capsids and reconstituted particles consist of all three of the polyoma capsid antigens VP1, VP2 and VP3 and there is no suggestion that pseudocapsids consisting of only the major capsid antigen VP1, could be used in genetic transfer.

[0270] Montross et al., (1991), described only the major capsid antigen, the cloning of the polyoma virus VP1 gene and its expression in insect cells. Self-assembly of empty pseudocapsids consisting of VP1 is disclosed, and pseudocapsids are said not to contain DNA. It is also reported that DNA inhibits the in vitro assembly of VP1 into empty pseudocapsids, which suggests that said pseudocapsids could not be used to package exogenous DNA for transfer to host cells. The results of (Sandig et al., 1993), showed that empty capsids incorporating exogenous DNA could transfer DNA in a biologically functional manner to host cells only if the particles consisted of all three polyoma capsid antigens VP1, VP2 and VP3. Pseudocapsids consisting of VPI were said to be unable to transfer to exogenous DNA so that it could be expressed in the host cells, probably due the absence of Ca²⁺ ions in the medium in which the pseudocapsids were prepared. Haynes et al (1993) discuss the effect of calcium ions on empty VP1 pseudocapsid assembly.

[0271] U.S. Pat. No. 6,046,173 discloses the use of a pseudocapsid formed from papovavirus major capsid antigen and excluding minor capsid antigens, which pseudocapsid incorporates exogenous material for gene transfer.

[0272] h. Other Viral Vectors

[0273] Other viral vectors may be employed as expression constructs in the present invention. Vectors derived from viruses such as sindbis virus and/or cytomegalovirus. They offer several attractive features for various mammalian cells (Friedmann, 1989; Ridgeway, 1988; Baichwal and/or Sugden, 1986; Coupar et al, 1988; Horwich et al., 1990).

[0274] With the recent recognition of defective hepatitis B viruses, new insight was gained into the structure-function relationship of different viral sequences. In vitro studies showed that the virus could retain the ability for helper-dependent packaging and/or reverse transcription despite the deletion of up to 80% of its genome (Horwich et al., 1990). This suggested that large portions of the genome could be replaced with foreign genetic material. Chang et al. recently introduced the chloramphenicol acetyltransferase (CAT) gene into duck hepatitis B virus genome in the place of the polymerase, surface, and/or pre-surface coding sequences. It was cotransfected with wild-type virus into an avian hepatoma cell line. Culture media containing high titers of the recombinant virus were used to infect primary duckling hepatocytes. Stable CAT gene expression was detected for at least 24 days after transfection (Chang et al., 1991).

[0275] i. Modified Viruses

[0276] In still further embodiments of the present invention, the nucleic acids to be delivered are housed within an infective virus that has been engineered to express a specific binding ligand. The virus particle will thus bind specifically to the cognate receptors of the target cell and/or deliver the contents to the cell. A novel approach designed to allow specific targeting of retrovirus vectors was recently developed based on the chemical modification of a retrovirus by the chemical addition of lactose residues to the viral envelope. This modification can permit the specific infection of hepatocytes via sialoglycoprotein receptors.

[0277] Another approach to targeting of recombinant retroviruses was designed in which biotinylated antibodies against a retroviral envelope protein and/or against a specific cell receptor were used. The antibodies were coupled via the biotin components by using streptavidin (Roux et al., 1989). Using antibodies against major histocompatibility complex class I and/or class II antigens, they demonstrated the infection of a variety of human cells that bore those surface antigens with an ecotropic virus in vitro (Roux et al, 1989).

[0278] j. Non-Viral Transfer

[0279] DNA constructs of the present invention are generally delivered to a cell, in certain situations, the nucleic acid to be transferred is non-infectious, and can be transferred using non-viral methods.

[0280] Several non-viral methods for the transfer of expression constructs into cultured mammalian cells are contemplated by the present invention. Suitable methods for nucleic acid delivery for transformation of an organelle, a cell, a tissue or an organism for use with the current invention are believed to include virtually any method by which a nucleic acid (e.g., DNA) can be introduced into an organelle, a cell, a tissue or an organism, as described herein or as would be known to one of ordinary skill in the art. Such methods include, but are not limited to, direct delivery of DNA such as by injection (U.S. Pat. Nos. 5,994,624, 5,981,274, 5,945,100, 5,780,448, 5,736,524, 5,702,932, 5,656,610, 5,589,466 and 5,580,859, each incorporated herein by reference), including microinjection (Harlan and Weintraub, 1985; U.S. Pat. No. 5,789,215, incorporated herein by reference); by electroporation (U.S. Pat. No. 5,384,253, incorporated herein by reference; Tur-Kaspa et al., 1986; Potter et al., 1984); by calcium phosphate precipitation (Graham and Van Der Eb, 1973; Chen and Okayama, 1987; Rippe et al., 1990); by using DEAE-dextran followed by polyethylene glycol (Gopal, 1985); by direct sonic loading (Fechheimer et al., 1987); by liposome mediated transfection (Nicolau and Sene, 1982; Fraley et al., 1979; Nicolau et al., 1987; Wong et al., 1980; Kaneda et al., 1989; Kato et al., 1991) and receptor-mediated transfection (Wu and Wu, 1987; Wu and Wu, 1988); by microprojectile bombardment (PCT Application Nos. WO 94/09699 and 95/06128; U.S. Pat. Nos. 5,610,042; 5,322,783 5,563,055, 5,550,318, 5,538,877 and 5,538,880, and each incorporated herein by reference); by agitation with silicon carbide fibers (Kaeppler et al., 1990; U.S. Pat. Nos. 5,302,523 and 5,464,765, each incorporated herein by reference); by Agrobacterium-mediated transformation (U.S. Pat. Nos. 5,591,616 and 5,563,055, each incorporated herein by reference); or by PEG-mediated transformation of protoplasts (Omirulleh et al., 1993; U.S. Pat. Nos. 4,684,611 and 4,952,500, each incorporated herein by reference); by desiccation/inhibition-mediated DNA uptake (Potrykus et al, 1985). Through the application of techniques such as these, organelle(s), cell(s), tissue(s) or organism(s) may be stably or transiently transformed.

[0281] Once the construct has been delivered into the cell the nucleic acid encoding the therapeutic gene may be positioned and expressed at different sites. In certain embodiments, the nucleic acid encoding the therapeutic gene may be stably integrated into the genome of the cell. This integration may be in the cognate location and orientation via homologous recombination (gene replacement) or it may be integrated in a random, non-specific location (gene augmentation). In yet further embodiments, the nucleic acid may be stably maintained in the cell as a separate, episomal segment of DNA. Such nucleic acid segments or “episomes” encode sequences sufficient to permit maintenance and replication independent of or in synchronization with the host cell cycle. How the expression construct is delivered to a cell and where in the cell the nucleic acid remains is dependent on the type of expression construct employed.

[0282] In a particular embodiment of the invention, the expression construct may be entrapped in a liposome. Liposomes are vesicular structures characterized by a phospholipid bilayer membrane and an inner aqueous medium. Multilamellar liposomes have multiple lipid layers separated by aqueous medium. They form spontaneously when phospholipids are suspended in an excess of aqueous solution. The lipid components undergo self-rearrangement before the formation of closed structures and entrap water and dissolved solutes between the lipid bilayers (Ghosh and Bachhawat, 1991). The addition of DNA to cationic liposomes causes a topological transition from liposomes to optically birefringent liquid-crystalline condensed globules (Radler et al., 1997). These DNA-lipid complexes are potential non-viral vectors for use in gene therapy.

[0283] Liposome-mediated nucleic acid delivery and expression of foreign DNA in vitro has been very successful. Using the β-lactamase gene, Wong et al. (1980) demonstrated the feasibility of liposome-mediated delivery and expression of foreign DNA in cultured chick embryo, HeLa, and hepatoma cells. Nicolau et al. (1987) accomplished successful liposome-mediated gene transfer in rats after intravenous injection. Also included are various commercial approaches involving “lipofection” technology.

[0284] In certain embodiments of the invention, the liposome may be complexed with a hemagglutinating virus (HVJ). This has been shown to facilitate fusion with the cell membrane and promote cell entry of liposome-encapsulated DNA (Kaneda et al., 1989). In other embodiments, the liposome may be complexed or employed in conjunction with nuclear nonhistone chromosomal proteins (HMG-1) (Kato et al., 1991). In yet further embodiments, the liposome may be complexed or employed in conjunction with both HVJ and HMG-1. In that such expression constructs have been successfully employed in transfer and expression of nucleic acid in vitro and in vivo, then they are applicable for the present invention.

[0285] Other vector delivery systems which can be employed to deliver a nucleic acid encoding a therapeutic gene into cells are receptor-mediated delivery vehicles. These take advantage of the selective uptake of macromolecules by receptor-mediated endocytosis in almost all eukaryotic cells. Because of the cell type-specific distribution of various receptors, the delivery can be highly specific (Wu and Wu, 1993).

[0286] Receptor-mediated gene targeting vehicles generally consist of two components: a cell receptor-specific ligand and a DNA-binding agent. Several ligands have been used for receptor-mediated gene transfer. The most extensively characterized ligands are asialoorosomucoid (ASOR) (Wu and Wu, 1987) and transferring (Wagner et al., 1990). Recently, a synthetic neoglycoprotein, which recognizes the same receptor as ASOR, has been used as a gene delivery vehicle (Ferkol et al., 1993; Perales et al., 1994) and epidermal growth factor (EGF) has also been used to deliver genes to squamous carcinoma cells (Myers, EPO 0273085).

[0287] In other embodiments, the delivery vehicle may comprise a ligand and a liposome. For example, Nicolau et al. (1987) employed lactosyl-ceramide, a galactose-terminal asialganglioside, incorporated into liposomes and observed an increase in the uptake of the insulin gene by hepatocytes. Thus, it is feasible that a nucleic acid encoding a therapeutic gene also may be specifically delivered into a cell type such as prostate, epithelial or tumor cells, by any number of receptor-ligand systems with or without liposomes. For example, the human prostate-specific antigen (Watt et al., 1986) may be used as the receptor for mediated delivery of a nucleic acid in prostate tissue.

[0288] In another embodiment of the invention, the expression construct may simply consist of naked recombinant DNA or plasmids. Transfer of the construct may be performed by any of the methods mentioned above which physically or chemically permeabilize the cell membrane. This is applicable particularly for transfer in vitro, however, it may be applied for in vivo use as well. Dubensky et al. (1984) successfully injected polyomavirus DNA in the form of CaPO₄ precipitates into liver and spleen of adult and newborn mice demonstrating active viral replication and acute infection. Benvenisty and Neshif (1986) also demonstrated that direct intraperitoneal injection of CaPO₄ precipitated plasmids results in expression of the transfected genes. It is envisioned that DNA encoding a CAM may also be transferred in a similar manner in vivo and express CAM.

[0289] Another embodiment of the invention for transferring a naked DNA expression construct into cells may involve particle bombardment. This method depends on the ability to accelerate DNA coated microprojectiles to a high velocity allowing them to pierce cell membranes and enter cells without killing them (Klein et al., 1987). Several devices for accelerating small particles have been developed. One such device relies on a high voltage discharge to generate an electrical current, which in turn provides the motive force (Yang et al., 1990). The microprojectiles used have consisted of biologically inert substances such as tungsten or gold beads.

[0290] VIII. Antibodies

[0291] a. Antibody Generation

[0292] It will be understood that polyclonal or monoclonal antibodies specific for the CHT and related proteins will have utilities in several applications. These include, for example, the use of antibodies for controlling transport of CHT proteins to the brain. An additional use is to link such antibodies to therapeutic agents, and to administer the antibodies to individuals with a disease such as Parkinson's disease, Huntington's disease, Alzheimer's, schizophrenia or dysautonomia and thereby modulating CHT and treating the disease.

[0293] Thus the invention further provides antibodies specific for the CHT proteins, polypeptides or peptides, encoded by the nucleic acid segments disclosed herein and their equivalents. Means for preparing and characterizing antibodies are well known in the art (See, e.g., Antibodies: A Laboratory Manual, Cold Spring Harbor Laboratory, 1988; incorporated herein by reference). Antibodies to CHT peptides or protein have been generated using such standard techniques.

[0294] The methods for generating monoclonal antibodies (MAbs) generally begin along the same lines as those for preparing polyclonal antibodies. Briefly, a polyclonal antibody is prepared by immunizing an animal with an immunogenic composition in accordance with the present invention and collecting antisera from that immunized animal.

[0295] A wide range of animal species can be used for the production of antisera. Typically the animal used for production of anti-antisera is a rabbit, a mouse, a rat, a hamster, a guinea pig or a goat. Because of the relatively large blood volume of rabbits, a rabbit is a preferred choice for production of polyclonal antibodies.

[0296] As is well known in the art, a given composition may vary in its immunogenicity. It is often necessary therefore to boost the host immune system, as may be achieved by coupling a peptide or polypeptide immunogen to a carrier. Exemplary and preferred carriers are keyhole limpet hemocyanin (KLH) and bovine serum albumin (BSA). Other albumins such as ovalbumin, mouse serum albumin or rabbit serum albumin can also be used as carriers. Means for conjugating a polypeptide to a carrier protein are well known in the art and include glutaraldehyde, m-maleimidobencoyl-N-hydroxysuccinimide ester, carbodiimyde and bis-biazotized benzidine.

[0297] As also is well known in the art, the immunogenicity of a particular immunogen composition can be enhanced by the use of non-specific stimulators of the immune response, known as adjuvants. Exemplary and preferred adjuvants include complete Freund's adjuvant (a non-specific stimulator of the immune response containing killed Mycobacterium tuberculosis), incomplete Freund's adjuvants and aluminum hydroxide adjuvant.

[0298] The amount of immunogen composition used in the production of polyclonal antibodies varies upon the nature of the immunogen as well as the animal used for immunization. A variety of routes can be used to administer the immunogen (subcutaneous, intramuscular, intradermal, intravenous and intraperitoneal). The production of polyclonal antibodies may be monitored by sampling blood of the immunized animal at various points following immunization.

[0299] A second, booster injection, also may be given. The process of boosting and titering is repeated until a suitable titer is achieved. When a desired level of immunogenicity is obtained, the immunized animal can be bled and the serum isolated and stored, and/or the animal can be used to generate MAbs.

[0300] For production of rabbit polyclonal antibodies, the animal can be bled through an ear vein or alternatively by cardiac puncture. The procured blood is allowed to coagulate and then centrifuged to separate serum components from whole cells and blood clots. The serum may be used as is for various applications or else the desired antibody fraction may be purified by well-known methods, such as affinity chromatography using another antibody or a peptide bound to a solid matrix or protein A followed by antigen (peptide) affinity column for purification.

[0301] MAbs may be readily prepared through use of well-known techniques, such as those exemplified in U.S. Pat. No. 4,196,265, incorporated herein by reference. Typically, this technique involves immunizing a suitable animal with a selected immunogen composition, e.g., a purified or partially purified CHT protein, polypeptide or peptide. The immunizing composition is administered in a manner effective to stimulate antibody producing cells.

[0302] The methods for generating monoclonal antibodies (MAbs) generally begin along the same lines as those for preparing polyclonal antibodies. Rodents such as mice and rats are preferred animals, however, the use of rabbit, sheep, goat, monkey cells also is possible. The use of rats may provide certain advantages (Goding, 1986, pp. 60-61), but mice are preferred, with the BALB/c mouse being most preferred as this is most routinely used and generally gives a higher percentage of stable fusions.

[0303] The animals are injected with antigen, generally as described above. The antigen may be coupled to carrier molecules such as keyhole limpet hemocyanin if necessary. The antigen would typically be mixed with adjuvant, such as Freund's complete or incomplete adjuvant. Booster injections with the same antigen would occur at approximately two-week intervals.

[0304] Following immunization, somatic cells with the potential for producing antibodies, specifically B lymphocytes (B cells), are selected for use in the MAb generating protocol. These cells may be obtained from biopsied spleens or lymph nodes. Spleen cells and lymph node cells are preferred, the former because they are a rich source of antibody-producing cells that are in the dividing plasmablast stage.

[0305] Often, a panel of animals will have been immunized and the spleen of animal with the highest antibody titer will be removed and the spleen lymphocytes obtained by homogenizing the spleen with a syringe. Typically, a spleen from an immunized mouse contains approximately 5×10⁷ to 2×10⁸ lymphocytes.

[0306] The antibody-producing B lymphocytes from the immunized animal are then fused with cells of an immortal myeloma cell, generally one of the same species as the animal that was immunized. Myeloma cell lines suited for use in hybridoma-producing fusion procedures preferably are non-antibody-producing, have high fusion efficiency, and enzyme deficiencies that render then incapable of growing in certain selective media which support the growth of only the desired fused cells (hybridomas).

[0307] Any one of a number of myeloma cells may be used, as are known to those of skill in the art (Goding, pp. 65-66, 1986; Campbell, pp. 75-83, 1984; each incorporated herein by reference). For example, where the immunized animal is a mouse, one may use P3-X63/Ag8, X63-Ag8.653, NS1/1.Ag 4 1, Sp210-Ag14, FO, NSO/U, MPC-11, MPC11-X45-GTG 1.7 and S194/5XX0 Bul; for rats, one may use R210.RCY3, Y3-Ag 1.2.3, IR983F and 4B210; and U-266, GM1500-GRG2, LICR-LON-HMy2 and UC729-6 are all useful in connection with human cell fusions.

[0308] One preferred murine myeloma cell is the NS-1 myeloma cell line (also termed P3-NS-1-Ag4-1), which is readily available from the NIGMS Human Genetic Mutant Cell Repository by requesting cell line repository number GM3573. Another mouse myeloma cell line that may be used is the 8-azaguanine-resistant mouse murine myeloma SP2/0 non-producer cell line.

[0309] Methods for generating hybrids of antibody-producing spleen or lymph node cells and myeloma cells usually comprise mixing somatic cells with myeloma cells in a 2:1 proportion, though the proportion may vary from about 20:1 to about 1:1, respectively, in the presence of an agent or agents (chemical or electrical) that promote the fusion of cell membranes. Fusion methods using Sendai virus have been described by Kohler and Milstein (1975; 1976), and those using polyethylene glycol (PEG), such as 37% (v/v)

[0310] PEG, by Gefter et al. (1977). The use of electrically induced fusion methods also is appropriate (Goding pp. 71-74, 1986).

[0311] Fusion procedures usually produce viable hybrids at low frequencies, about 1×10⁻⁶ to 1×10⁻⁸. However, this does not pose a problem, as the viable, fused hybrids are differentiated from the parental, infused cells (particularly the infused myeloma cells that would normally continue to divide indefinitely) by culturing in a selective medium. The selective medium is generally one that contains an agent that blocks the de novo synthesis of nucleotides in the tissue culture media. Exemplary and preferred agents are aminopterin, methotrexate, and azaserine. Aminopterin and methotrexate block de novo synthesis of both purines and pyrimidines, whereas azaserine blocks only purine synthesis. Where aminopterin or methotrexate is used, the media is supplemented with hypoxanthine and thymidine as a source of nucleotides (HAT medium). Where azaserine is used, the media is supplemented with hypoxanthine.

[0312] One selection medium is HAT. Only cells capable of operating nucleotide salvage pathways are able to survive in HAT medium. The myeloma cells are defective in key enzymes of the salvage pathway, e.g., hypoxanthine phosphoribosyl transferase (HPRT), and they cannot survive. The B cells can operate this pathway, but they have a limited life span in culture and generally die within about two weeks. Therefore, the only cells that can survive in the selective media are those hybrids formed from myeloma and B cells.

[0313] This culturing provides a population of hybridomas from which specific hybridomas are selected. Typically, selection of hybridomas is performed by culturing the cells by single-clone dilution in microtiter plates, followed by testing the individual clonal supernatants (after about two to three weeks) for the desired reactivity. The assay should be sensitive, simple and rapid, such as radioimmunoassays, enzyme immunoassays, cytotoxicity assays, plaque assays, dot immunobinding assays, and the like.

[0314] The selected hybridomas would then be serially diluted and cloned into individual antibody-producing cell lines, which clones can then be propagated indefinitely to provide MAbs. The cell lines may be exploited for MAb production in two basic ways.

[0315] A sample of the hybridoma can be injected (often into the peritoneal cavity) into a histocompatible animal of the type that was used to provide the somatic and myeloma cells for the original fusion (e.g., a syngeneic mouse). Optionally, the animals are primed with a hydrocarbon, especially oils such as pristane (tetramethylpentadecane) prior to injection. The injected animal develops tumors secreting the specific monoclonal antibody produced by the fused cell hybrid. The body fluids of the animal, such as serum or ascites fluid, can then be tapped to provide MAbs in high concentration.

[0316] The individual cell lines could also be cultured in vitro, where the MAbs are naturally secreted into the culture medium from which they can be readily obtained in high concentrations.

[0317] MAbs produced by either means may be further purified, if desired, using filtration, centrifugation and various chromatographic methods such as HPLC or affinity chromatography. Fragments of the monoclonal antibodies of the invention can be obtained from the purified monoclonal antibodies by methods which include digestion with enzymes, such as pepsin or papain, and/or by cleavage of disulfide bonds by chemical reduction. Alternatively, monoclonal antibody fragments encompassed by the present invention can be synthesized using an automated peptide synthesizer.

[0318] It also is contemplated that a molecular cloning approach may be used to generate monoclonals. For this, combinatorial immunoglobulin phagemid libraries are prepared from RNA isolated from the spleen of the immunized animal, and phagemids expressing appropriate antibodies are selected by panning using cells expressing the antigen and control cells e.g., normal-versus-tumor cells. The advantages of this approach over conventional hybridoma techniques are that approximately 104 times as many antibodies can be produced and screened in a single round, and that new specificities are generated by H and L chain combination which further increases the chance of finding appropriate antibodies.

[0319] Humanized monoclonal antibodies are antibodies of animal origin that have been modified using genetic engineering techniques to replace constant region and/or variable region framework sequences with human sequences, while retaining the original antigen specificity. Such antibodies are commonly derived from rodent antibodies with specificity against human antigens. such antibodies are generally useful for in vivo therapeutic applications. This strategy reduces the host response to the foreign antibody and allows selection of the human effector functions.

[0320] The techniques for producing humanized immunoglobulins are well known to those of skill in the art. For example U.S. Pat. No. 5,693,762 discloses methods for producing, and compositions of, humanized immunoglobulins having one or more complementarity determining regions (CDR's). When combined into an intact antibody, the humanized immunoglobulins are substantially non-immunogenic in humans and retain substantially the same affinity as the donor immunoglobulin to the antigen, such as a protein or other compound containing an epitope.

[0321] Other U.S. patents, each incorporated herein by reference, that teach the production of antibodies useful in the present invention include U.S. Pat. No. 5,565,332, which describes the production of chimeric antibodies using a combinatorial approach; U.S. Pat. No. 4,816,567 which describes recombinant immunoglobin preparations and U.S. Pat. No. 4,867,973 which describes antibody-therapeutic agent conjugates.

[0322] U.S. Pat. No. 5,565,332 describes methods for the production of antibodies, or antibody fragments, which have the same binding specificity as a parent antibody but which have increased human characteristics. Humanized antibodies may be obtained by chain shuffling, perhaps using phage display technology, in as much as such methods will be useful in the present invention the entire text of U.S. Pat. No. 5,565,332 is incorporated herein by reference. Human antibodies may also be produced by transforming B cells with EBV and subsequent cloning of secretors as described by Hoon et al., (1993).

[0323] b. Cross-Reactive Antibodies and Epitopes

[0324] The invention further encompasses anti-CHT marker antibodies and antibody-based compositions, such as antibody conjugates and immunotoxins, that bind to the same antigens and/or epitopes as the antibodies disclosed herein (e.g., those raised to the peptides of SEQ ID NO:2 or SEQ ID NO:4). Such antibodies may be of the polyclonal or monoclonal type, with monoclonals being generally prefeffed.

[0325] The identification of an antibody that binds to CHT or an epitope thereof, in substantially the same manner as an antibody of the invention is a fairly straightforward matter. This can be readily determined using any one of variety of immunological screening assays in which antibody competition can be assessed.

[0326] For example, where the test antibodies to be examined are obtained from different source animals, or are even of a different isotype, a simple competition assay may be employed in which the control and test antibodies are premixed and then applied to an antigen composition. By “antigen composition” is meant any composition that contains a CHT or related antigen as described herein. Thus, protocols based upon ELISAs and Western blotting are suitable for use in such simple competition studies.

[0327] In such embodiments, one would pre-mix the control antibodies with varying amounts of the test antibodies (e.g., 1:1, 1:10 and 1:100) for a period of time prior to applying to an antigen composition, such as an antigen-coated well of an ELISA plate or an antigen adsorbed to a membrane (as in dot blots and Western blots). By using species or isotype secondary antibodies one will be able to detect only the bound control antibodies, the binding of which will be reduced by the presence of a test antibody that recognizes the same epitope/antigen.

[0328] In conducting an antibody competition study between a control antibody, such as an anti-CHT antibody, and any test antibody, one may first label the control with a detectable label, such as, e.g., biotin or an enzymatic, radioactive or fluorescent label, to enable subsequent identification. In these cases, one would incubate the labeled control antibodies with the test antibodies to be examined at various ratios (e.g., 1:1, 1:10 and 1:100) and, after a suitable period of time, one would then assay the reactivity of the labeled control antibodies and compare this with a control value in which no potentially competing test antibody was included in the incubation.

[0329] The assay may again be any one of a range of immunological assays based upon antibody hybridization, and the control antibodies would be detected by means of detecting their label, e.g., using streptavidin in the case of biotinylated antibodies or by using a chromogenic substrate in connection with an enzymatic label or by simply detecting a radioactive or fluorescent label. An antibody that binds to substantially the same epitope as the control antibodies will be able to effectively compete for binding and thus will significantly reduce control antibody binding, as evidenced by a reduction in boundlabel.

[0330] The reactivity of the labeled control antibodies in the absence of any test antibody would be the control high value. The control low value would be obtained by incubating the labeled antibodies with unlabelled antibodies of the same type, when competition would occur and reduce binding of the labeled antibodies. A significant reduction in labeled antibody reactivity in the presence of a test antibody is indicative of a test antibody that recognizes the same epitope, i.e., one that “cross-reacts” with the labeled antibody. A significant reduction is a reproducible, i.e., consistently observed, reduction in binding.

[0331] c. Antibody Conjugates

[0332] Antibody conjugates in which a CHT marker antibody is linked to a detectable label or a cytotoxic agent form further aspects of the invention. Diagnostic antibody conjugates may be used both in vitro diagnostics, as in a variety of immunoassays, and in vivo diagnostics, such as in imaging technology.

[0333] Certain antibody conjugates include those intended primarily for use in vitro, where the antibody is linked to a secondary binding ligand or to an enzyme (an enzyme tag) that will generate a colored product upon contact with a chromogenic substrate. Examples of suitable enzymes include urease, alkaline phosphatase, (horseradish) hydrogen peroxidase and glucose oxidase. Preferred secondary binding ligands are biotin and avidin or streptavidin compounds. The use of such labels is well known to those of skill in the art in light and is described, for example, in U.S. Pat. Nos. 3,817,837; 3,850,752; 3,939,350; 3,996,345; 4,277,437; 4,275,149 and 4,366,241; each incorporated herein by reference.

[0334] d. Antibodies for Use in vitro Also may be Radiolabeled Antibody Conjugates

[0335] In using an antibody-based molecule as an in vivo diagnostic agent to provide an image of a tissue sample, magnetic resonance imaging, X-ray imaging, computerized emission tomography and such technologies may be employed. In the antibody-imaging constructs of the invention, the antibody portion used will generally bind to the antigen marker, such as CHT, and the imaging agent will be an agent detectable upon imaging, such as a paramagnetic, radioactive or fluorescent agent.

[0336] Many appropriate imaging agents are known in the art, as are methods for their attachment to antibodies (see, e.g., U.S. Pat. Nos. 5,021,236 and 4,472,509, both incorporated herein by reference). Certain attachment methods involve the use of a metal chelate complex employing, for example, an organic chelating agent such a DTPA attached to the antibody (U.S. Pat. No. 4,472,509). Monoclonal antibodies also may be reacted with an enzyme in the presence of a coupling agent such as glutaraldehyde or periodate. Conjugates with fluorescein markers are prepared in the presence of these coupling agents or by reaction with an isothiocyanate. Fluorescent labels include, but are not limited to rhodamine, fluorescein isothiocyanate and renographin.

[0337] In the case of paramagnetic ions, one might mention by way of example ions such as chromium (III), manganese (II), iron (III), iron (II), cobalt (II), nickel (II), copper (II), neodymium (III), samarium (III), ytterbium (III), gadolinium (III), vanadium (II), terbium (III), dysprosium (III), holmium (III) and erbium (III), with gadolinium being particularly preferred.

[0338] Ions useful in other contexts, such as X-ray imaging, include but are not limited to lanthanum (III), gold (III), lead (II), and especially bismuth (III).

[0339] In the case of radioactive isotopes for therapeutic and/or diagnostic application, one might mention astatine²¹¹, ¹⁴carbon, ⁵¹chromium, ³⁶chlorine, ⁵⁷cobalt, ⁵⁸cobalt, copper⁶⁷, ¹⁵²Eu, gallium⁶⁷, ³hydrogen, iodine¹²³, iodine¹²⁵, iodine¹³¹, indium¹¹¹, ⁵⁹iron, ³²phosphorus, rhenium¹⁸⁶, rheniuml¹⁸⁸, ⁷⁵selenium, ³⁵sulphur, technicium^{99m} and yttrium⁹⁰. ¹²⁵I is often being preferred for use in certain embodiments, and technicium^{99m} and indiuml¹¹¹ are also often preferred due to their low energy and suitability for long range detection.

[0340] Radioactively labeled monoclonal antibodies of the present invention may be produced according to well-known methods in the art. For instance, monoclonal antibodies can be iodinated by contact with sodium or potassium iodide and a chemical oxidizing agent such as sodium hypochlorite, or an enzymatic oxidizing agent, such as lactoperoxidase. Monoclonal antibodies according to the invention may be labeled with technetium-^{99m} by ligand exchange process, for example, by reducing pertechnate with stannous solution, chelating the reduced technetium onto a Sephadex column and applying the antibody to this column or by direct labeling techniques, e.g., by incubating pertechnate, a reducing agent such as SNCl₂, a buffer solution such as sodium-potassium phthalate solution, and the antibody.

[0341] Intermediary functional groups which are often used to bind radioisotopes which exist as metallic ions to antibody are diethylenetriaminepentaacetic acid (DTPA) and ethylene diaminetetracetic acid (EDTA).

[0342] IX. Protein Purification

[0343] To prepare a composition comprising a CHT, or more preferentially, the hCHT or mCHT it may be desirable to purify the components or variants thereof According to one embodiment of the present invention, purification of a peptide comprising the hCHT or mCHT can be utilized ultimately to operatively link this domain with a selective agent. Protein purification techniques are well known to those of skill in the art. These techniques involve, at one level, the crude fractionation of the cellular milieu to polypeptide and non-polypeptide fractions. Having separated the polypeptide from other proteins, the polypeptide of interest may be further purified using chromatographic and electrophoretic techniques to achieve partial or complete purification (or purification to homogeneity). Analytical methods particularly suited to the preparation of a pure peptide are ion-exchange chromatography, exclusion chromatography; polyacrylamide gel electrophoresis; isoelectric focusing. A particularly efficient method of purifying peptides is fast protein liquid chromatography or even HPLC.

[0344] Certain aspects of the present invention concern the purification, and in particular embodiments, the substantial purification, of an encoded protein or peptide, such as a hCHT or mCHT inhibitor. The term “purified protein or peptide” as used herein, is intended to refer to a composition, isolatable from other components, wherein the protein or peptide is purified to any degree relative to its naturally-obtainable state. A purified protein or peptide therefore also refers to a protein or peptide, free from the environment in which it may naturally occur.

[0345] Generally, “purified” will refer to a protein or peptide composition, such as the hCHT or mCHT inhibitor, that has been subjected to fractionation to remove various other components, and which composition substantially retains its expressed biological activity. Where the term “substantially purified” is used, this designation will refer to a composition in which the protein or peptide forms the major component of the composition, such as constituting about 50%, about 60%, about 70%, about 80%, about 90%, about 95% or more of the proteins in the composition.

[0346] Various methods for quantifying the degree of purification of the protein or peptide will be known to those of skill in the art in light of the present disclosure. These include, for example, determining the specific activity of an active fraction, or assessing the amount of polypeptides within a fraction by SDS/PAGE analysis. A preferred method for assessing the purity of a fraction is to calculate the specific activity of the fraction, to compare it to the specific activity of the initial extract, and to thus calculate the degree of purity, herein assessed by a “-fold purification number.” The actual units used to represent the amount of activity will, of course, be dependent upon the particular assay technique chosen to follow the purification and whether or not the expressed protein or peptide exhibits a detectable activity.

[0347] Various techniques suitable for use in protein purification will be well known to those of skill in the art. These include, for example, precipitation with ammonium sulphate, PEG, antibodies and the like or by heat denaturation, followed by centrifugation; chromatography steps such as ion exchange, gel filtration, reverse phase, hydroxylapatite and affinity chromatography; isoelectric focusing; gel electrophoresis; and combinations of such and other techniques. As is generally known in the art, it is believed that the order of conducting the various purification steps may be changed, or that certain steps may be omitted, and still result in a suitable method for the preparation of a substantially purified protein or peptide.

[0348] There is no general requirement that the protein or peptide always be provided in their most purified state. Indeed, it is contemplated that less substantially purified products will have utility in certain embodiments. Partial purification may be accomplished by using fewer purification steps in combination, or by utilizing different forms of the same general purification scheme. For example, it is appreciated that a cation-exchange column chromatography performed utilizing an HPLC apparatus will generally result in a greater “-fold” purification than the same technique utilizing a low pressure chromatography system. Methods exhibiting a lower degree of relative purification may have advantages in total recovery of protein product, or in maintaining the activity of an expressed protein.

[0349] It is known that the migration of a polypeptide can vary, sometimes significantly, with different conditions of SDSIPAGE (Capaldi et al., 1977). It will therefore be appreciated that under differing electrophoresis conditions, the apparent molecular weights of purified or partially purified expression products may vary.

[0350] Ion exchange chromatography can be used as a method of separation. Using columns resins such as the metal affinity chromatography resin TALON are also preferred. TALON resin has an enhanced resolving power for polyhistidine-tagged proteins. This results in greater purity with less effort. TALON employs cobalt, an electropositive metal with a remarkably high affinity for polyhistidine-tagged proteins and a low affinity for other proteins. Often, no discernible binding of host proteins occurs and a separate wash step is not required. The binding properties of cobalt allow protein elution under mild pH conditions that protect protein integrity.

[0351] Further concentration of the proteins can be done on an anion exchange column, such as the MonoQ column, a high resolution, anion exchange column. This column works at pressures less than 5 MPa, has a high capacity and gives very high chromatographic resolution.

[0352] High Performance Liquid Chromatography (HPLC) is characterized by a very rapid separation with extraordinary resolution of peaks. This is achieved by the use of very fine particles and high pressure to maintain an adequate flow rate. Separation can be accomplished in a matter of minutes, or at most an hour. Moreover, only a very small volume of the sample is needed because the particles are so small and close-packed that the void volume is a very small fraction of the bed volume Also, the concentration of the sample need not be very great because the bands are so narrow that there is very little dilution of the sample.

[0353] Gel chromatography, or molecular sieve chromatography, is a special type of partition chromatography that is based on molecular size. The theory behind gel chromatography is that the column, which is prepared with tiny particles of an inert substance that contain small pores, separates larger molecules from smaller molecules as they pass through or around the pores, depending on their size. As long as the material of which the particles are made does not adsorb the molecules, the sole factor determining rate of flow is the size. Hence, molecules are eluted from the column in decreasing size, so long as the shape is relatively constant. Gel chromatography is unsurpassed for separating molecules of different size because separation is independent of all other factors such as pH, ionic strength, temperature, etc. There also is virtually no adsorption, less zone spreading and the elution volume is related in a simple matter to molecular weight.

[0354] Affinity chromatography, a particularly efficient method of purifying peptides, is a chromatographic procedure that relies on the specific affinity between a substance to be isolated and a molecule that it can specifically bind to. This is a receptor-ligand type interaction. The column material is synthesized by covalently coupling one of the binding partners to an insoluble matrix. The column material is then able to specifically adsorb the substance from the solution. Elution occurs by changing the conditions to those in which binding will not occur (e.g., alter pH, ionic strength, and temperature.).

[0355] A particular type of affinity chromatography useful in the purification of carbohydrate containing compounds is lectin affinity chromatography. Lectins are a class of substances that bind to a variety of polysaccharides and glycoproteins. Lectins are usually coupled to agarose by cyanogen bromide. Conconavalin A coupled to Sepharose was the first material of this sort to be used and has been widely used in the isolation of polysaccharides and glycoproteins other lectins that have been include lentil lectin, wheat germ agglutinin which has been useful in the purification of N-acetyl glucosaminyl residues and Helix pomatia lectin. Lectins themselves are purified using affinity chromatography with carbohydrate ligands. Lactose has been used to purify lectins from castor bean and peanuts; maltose has been useful in extracting lectins from lentils and jack bean; N-acetyl-D galactosamine is used for purifying lectins from soybean; N-acetyl glucosaminyl binds to lectins from wheat germ; D-galactosamine has been used in obtaining lectins from clams and L-fucose will bind to lectins from lotus.

[0356] The matrix should be a substance that itself does not adsorb molecules to any significant extent and that has a broad range of chemical, physical and thermal stability. The ligand should be coupled in such a way as to not affect its binding properties. The ligand also should provide relatively tight binding, and it should be possible to elute the substance without destroying the sample or the ligand. One of the most common forms of affinity chromatography is immunoaffinity chromatography. The generation of antibodies that would be suitable for use in accord with the present invention.

[0357] a. Synthetic Peptides

[0358] The present invention also describes a hCHT or mCHT inhibitor, including an fusion protein, for use in various embodiments of the present invention. The peptides of the invention can be synthesized in solution or on a solid support in accordance with conventional techniques. Various automatic synthesizers are commercially available and can be used in accordance with known protocols. See, for example, Stewart and Young, (1984); Tam et al., (1983); Merrifield, (1986); and Barany and Merrifield (1979), each incorporated herein by reference. Short peptide sequences, or libraries of overlapping peptides, usually from about 6 up to about 35 to 50 amino acids, which correspond to the selected regions described herein, can be readily synthesized and then screened in screening assays designed to identify reactive peptides. Peptides with at least about 10, 11, 12, 13, 14, 15, 16, 17, 18, 19, 20, 21, 22, 23, 24, 25, 26, 27, 28, 29, 30, 31, 32, 33, 34, 35, 36, 37, 38, 39, 40, 41, 42, 43, 44, 45, 50, 55, 60, 65, 70, 75, 80, 85, 90, 95 or up to about 100 amino acid residues are contemplated by the present invention.

[0359] The compositions of the invention may include a peptide comprising a CHT, a CHT inhibitor, or a MEK that has been modified to enhance its activity or to render it biologically protected. Biologically protected peptides have certain advantages over unprotected peptides when administered to human subjects and, as disclosed in U.S. Pat. No. 5,028,592, incorporated herein by reference, protected peptides often exhibit increased pharmacological activity.

[0360] Compositions for use in the present invention may also comprise peptides that include all L-amino acids, all D-amino acids, or a mixture thereof The use of D-amino acids may confer additional resistance to proteases naturally found within the human body and are less immunogenic and can therefore be expected to have longer biological half lives.

[0361] b. Protein Modification for Purification

[0362] Thirteen transmembrane domains have been predicted for the hCHT protein. Because transmembrane domains are hydrophobic and tend to make the purification and isolation of a protein more difficult, it is an aspect of the present invention that mutant proteins lacking one or more of the transmembrane domains be made by techniques described herein. These deletion varient CHTs can more easily be purified by the techniques described herein and those know in the art.

[0363] X. Recombinant Expression of CHT Peptides

[0364] Recombinant clones expressing the CHT nucleic acid segments may be used to prepare purified recombinant human CHT protein (hCHT), purified hCHT-derived peptide antigens as well as mutant or variant recombinant protein species in significant quantities. The selected antigens, and variants thereof, are proposed to have significant utility in diagnosing and treating neuromuscular, autonomic or CNS disorders. For example, it is proposed that hCHTs, peptide variants thereof, and/or antibodies against such hCHTs may also be used in immunoassays to detect the influence of cholinergic signaling or as vaccines or immunotherapeutics to treat diseases such as Parkinson's disease, Huntington's disease, Alzheimer's, schizophrenia and dysautonomia. Additionally, by application of techniques such as DNA mutagenesis, the present invention allows the ready preparation of so-called “second generation” molecules having modified or simplified protein structures. Second generation proteins will typically share one or more properties in common with the full-length antigen, such as a particular antigenic/immunogenic epitopic core sequence. Epitopic sequences can be obtained from relatively short molecules prepared from knowledge of the peptide, or encoding DNA sequence information. Such variant molecules may not only be derived from selected immunogenic/antigenic regions of the protein structure, but may additionally, or alternatively, include one or more functionally equivalent amino acids selected on the basis of similarities or even differences with respect to the natural sequence.

[0365] XI. Screens: Modulators of Protein Function

[0366] The present invention further comprises methods for identifying modulators of the function of CHT. These assays may comprise random screening of large libraries of candidate substances; alternatively, the assays may be used to focus on particular classes of compounds selected with an eye towards structural attributes that are believed to make them more likely to modulate the function of CHT.

[0367] To identify a CHT modulator, one generally will determine the function of CHT in the presence and absence of the candidate substance, a modulator defined as any substance that alters function. By function, it is meant that one may assay for the increase or decrease in high-affinity choline uptake. For example, a method generally comprises:

[0368] (a) providing a candidate modulator;

[0369] (b) admixing the candidate modulator with an isolated compound or cell, or a suitable experimental animal;

[0370] (c) measuring one or more characteristics of the compound, cell or animal in step (c); and

[0371] (d) comparing the characteristic measured in step (c) with the characteristic of the compound, cell or animal in the absence of said candidate modulator,

[0372] wherein a difference between the measured characteristics indicates that said candidate modulator is, indeed, a modulator of the compound, cell or animal. Assays may be conducted in cell free systems, in isolated cells, or in organisms including transgenic animals such as transgenic mice.

[0373] It will, of course, be understood that all the screening methods of the present invention are useful in themselves notwithstanding the fact that effective candidates may not be found. The invention provides methods for screening for such candidates, not solely methods of finding them.

[0374] a. Modulators

[0375] As used herein the term “candidate substance” refers to any molecule that may potentially inhibit or enhance CHT activity. The candidate substance may be a protein or fragment thereof, a small molecule, or even a nucleic acid molecule. It may prove to be the case that the most useful pharmacological compounds will be compounds that are structurally related to hCHT or mCHT peptides. Using lead compounds to help develop improved compounds is know as “rational drug design” and includes not only comparisons with know inhibitors and activators, but predictions relating to the structure of target molecules.

[0376] The goal of rational drug design is to produce structural analogs of biologically active polypeptides or target compounds. By creating such analogs, it is possible to fashion drugs, which are more active or stable than the natural molecules, which have different susceptibility to alteration or which may affect the function of various other molecules. In one approach, one would generate a three-dimensional structure for a target molecule, or a fragment thereof. This could be accomplished by x-ray crystallography, computer modeling or by a combination of both approaches.

[0377] It also is possible to use antibodies to ascertain the structure of a target compound activator or inhibitor. In principle, this approach yields a pharmacore upon which subsequent drug design can be based. It is possible to bypass protein crystallography altogether by generating anti-idiotypic antibodies to a functional, pharmacologically active antibody. As a mirror image of a mirror image, the binding site of anti-idiotype would be expected to be an analog of the original antigen. The anti-idiotype could then be used to identify and isolate peptides from banks of chemically- or biologically-produced peptides. Selected peptides would then serve as the pharmacore. Anti-idiotypes may be generated using the methods described herein for producing antibodies, using an antibody as the antigen.

[0378] On the other hand, one may simply acquire, from various commercial sources, small molecule libraries that are believed to meet the basic criteria for useful drugs in an effort to “brute force” the identification of useful compounds. Screening of such libraries, including combinatorially generated libraries (e.g., peptide libraries), is a rapid and efficient way to screen large number of related (and unrelated) compounds for activity. Combinatorial approaches also lend themselves to rapid evolution of potential drugs by the creation of second, third and fourth generation compounds modeled of active, but otherwise undesirable compounds.

[0379] Candidate compounds may include fragments or parts of naturally-occurring compounds, or may be found as active combinations of known compounds, which are otherwise inactive. It is proposed that compounds isolated from natural sources, such as animals, bacteria, fungi, plant sources, including leaves and bark, and marine samples may be assayed as candidates for the presence of potentially useful pharmaceutical agents. It will be understood that the pharmaceutical agents to be screened could also be derived or synthesized from chemical compositions or man-made compounds. Thus, it is understood that the candidate substance identified by the present invention may be peptide, polypeptide, polynucleotide, small molecule inhibitors or any other compounds that may be designed through rational drug design starting from known inhibitors or stimulators.

[0380] Other suitable modulators include antisense molecules, ribozymes, and antibodies (including single chain antibodies), each of which would be specific for the target molecule. Such compounds are described in greater detail elsewhere in this document. For example, an antisense molecule that bound to a translational or transcriptional start site, or splice junctions, would be ideal candidate inhibitors.

[0381] In addition to the modulating compounds initially identified, the inventors also contemplate that other sterically similar compounds may be formulated to mimic the key portions of the structure of the modulators. Such compounds, which may include peptidomimetics of peptide modulators, may be used in the same manner as the initial modulators.

[0382] An inhibitor according to the present invention may be one which exerts its inhibitory or activating effect upstream, downstream or directly on CHT. Regardless of the type of inhibitor or activator identified by the present screening methods, the effect of the inhibition or activator by such a compound results in altering CHT function as compared to that observed in the absence of the added candidate substance.

[0383] b. In vitro Assays

[0384] A quick, inexpensive and easy assay to run is an in vitro assay. Such assays generally use isolated molecules, can be run quickly and in large numbers, thereby increasing the amount of information obtainable in a short period of time. A variety of vessels may be used to run the assays, including test tubes, plates, dishes and other surfaces such as dipsticks or beads.

[0385] One example of a cell free assay is a binding assay. While not directly addressing function, the ability of a modulator to bind to a target molecule in a specific fashion is strong evidence of a related biological effect. For example, binding of a molecule to a target may, in and of itself, be inhibitory, due to steric, allosteric or charge-charge interactions. The target may be either free in solution, fixed to a support, expressed in or on the surface of a cell. Either the target or the compound may be labeled, thereby permitting determining of binding. Usually, the target will be the labeled species, decreasing the chance that the labeling will interfere with or enhance binding. Competitive binding formats can be performed in which one of the agents is labeled, and one may measure the amount of free label versus bound label to determine the effect on binding.

[0386] A technique for high throughput screening of compounds is described in WO 84/03564. Large numbers of small peptide test compounds are synthesized on a solid substrate, such as plastic pins or some other surface. Bound polypeptide is detected by various methods.

[0387] C. In cyto Assays

[0388] The present invention also contemplates the screening of compounds for their ability to modulate CHT in cells. Various cell lines can be utilized for such screening assays, including cells specifically engineered for this purpose.

[0389] Depending on the assay, culture may be required. The cell is examined using any of a number of different physiologic assays. Alternatively, molecular analysis may be performed, for example, looking at protein expression, mRNA expression (including differential display of whole cell or polyA RNA) and others.

[0390] d. In vivo Assays

[0391] In vivo assays involve the use of various animal models, including transgenic animals that have been engineered to have specific defects, or carry markers that can be used to measure the ability of a candidate substance to reach and effect different cells within the organism. Due to their size, ease of handling, and information on their physiology and genetic make-up, mice are a preferred embodiment, especially for transgenics. However, other animals are suitable as well, including rats, rabbits, hamsters, guinea pigs, gerbils, woodchucks, cats, dogs, sheep, goats, pigs, cows, horses and monkeys (including chimps, gibbons and baboons). Assays for modulators may be conducted using an animal model derived from any of these species.

[0392] In such assays, one or more candidate substances are administered to an animal, and the ability of the candidate substance(s) to alter one or more characteristics, as compared to a similar animal not treated with the candidate substance(s), identifies a modulator. The characteristics may be any of those discussed above with regard to the function of a particular compound (e.g., enzyme, receptor, hormone) or cell (e.g., growth, tumorigenicity, survival), or instead a broader indication such as behavior, anemia, immune response, etc.

[0393] The present invention provides methods of screening for a candidate substance that modulate high-affinity choline uptake. In these embodiments, the present invention is directed to a method for determining the ability of a candidate substance to modulate HACU generally including the steps of: administering a candidate substance to the animal; and determining the ability of the candidate substance to alter HACU and thereby alter Ach synthesis.

[0394] Treatment of these animals with test compounds will involve the administration of the compound, in an appropriate form, to the animal. Administration will be by any route that could be utilized for clinical or non-clinical purposes, including but not limited to oral, nasal, buccal, or even topical. Alternatively, administration may be by intratracheal instillation, bronchial instillation, intradermal, subcutaneous, intramuscular, intraperitoneal or intravenous injection. Specifically contemplated routes are systemic intravenous injection, regional administration via blood or lymph supply, or directly to an affected site.

[0395] Determining the effectiveness of a compound in vivo may involve a variety of different criteria. Also, measuring toxicity and dose response can be performed in animals in a more meaningful fashion than in in vitro or in cyto assays.

[0396] e. Choline Transport Assay

[0397] A preferred method for screening for modulation of CHT function is a choline transport assay. The choline transport assay can be used to determine the effectiveness of candidate substances in the modulation of high-affinity choline uptake. The ion-dependence of choline transport can be determined by replacing Na+ with equimolar concentrations of Li⁺ and replacing Cl⁻ was replaced with equimolar concentrations of isethionate. Specific transport can be determined by quantifying non-specific uptake in the presence of HC-3 as determined by radioactivity and subtracting the non-specific uptake from the total uptake to yield specific transport.

[0398] Radiolabeling assays are preferred for determining uptake. [³H] can be used as a radiolabel.

[0399] f. Other Cholinergic Markers

[0400] Other methods for determining modulation of cholinergic function that can be used in the current invention include acetylcholinesterase (AChE) staining, AChEs and choline acetyltransferase activities, binding to α-bungarotoxin-sensitive nACHRs (a class of nAChRs which is spared in p2−/− mice (Zoli et al., 1998) or binding to muscarinic M1 and M2-type receptors. (Zoli et al., 1999).

[0401] XI. Diagnostics for hCHT and mCHT

[0402] Agents that modulate the choline transporter function represent a novel opportunity to influence cholinergic signaling therapeutically for neuromuscular, autonomic or central nervous system (CNS) disorders. The present invention provides methods for identifying new compounds that modulate CHT, or more preferably hCHT or mCHT activity, which may be termed as “candidate substances.” The candidate substance can be a small molecule, peptide, polypeptide, protein or polymer and can increase or decrease the rate of CTU.

[0403] “Modulating compounds” or “compounds that modulate high-affinity choline uptake” is meant to refer to substances that enhance, inhibit, or alter the activity of CHT. Such altered activity includes, but is not limited to, changes in binding preferences for target substrates, and changes in proteinaceous molecule-proteinaceous molecule interactions of CHT that may occur. It is contemplated that such screening techniques will prove useful in the general identification of any compound that will serve the purpose of modulating CHT, or more particularly hCHT or mCHT activity.

[0404] It is further contemplated that useful compounds in this regard will in no way be limited to proteinaceous or peptidyl compounds. In fact, it may prove to be the case that the most useful pharmacological compounds for identification through application of the screening assays will be non-peptidyl in nature and, e.g., which will serve to modulate hCHT or mCHT activity through a tight binding or other chemical interaction. Candidate substances may be obtained from, for example, libraries of synthetic chemicals, or from natural samples, such as rain forest and marine samples.

[0405] a. CHTprotease Assay

[0406] To identify a hCHT or mCHT modulator using a CHT protease assay, one would simply conduct parallel or otherwise comparatively controlled protease assays and identify a compound that modulates CHT protease activity. The candidate screening assay is quite simple to set up and perform. After obtaining a relatively purified preparation of CHT protein, polypeptide or peptide, either from native or recombinant sources, one will simply admix a candidate substance with the CHT preparation, under conditions that would allow hCHT or mCHT to perform its function but for inclusion of a modulating substance.

[0407] For example, one will typically desire to include within the admixture an amount of a CHT protease, although other substrates may be used, such as other proteases. In any event, one would measure the ability of the candidate substance to alter protease inhibition by the hCHT or mCHT protein, polypeptide, or peptide in the presence of the candidate substance. In general, one will desire to measure or otherwise determine the activity of the relatively purified CHT in the absence of the added candidate substance relative to the activity in the presence of the candidate substance in order to assess the relative modulating capability of the candidate substance.

[0408] b. Immunoassays

[0409] The antibodies and other candidate substances of the invention can be used as therapeutic agents for neuromuscular, autonomic or CNS disorders. Immunodetection methods may be used in the current invention for detecting biological components as well as binding, purifying, removing and quantifying the biological component. The encoded proteins or peptides of the present invention may be employed to detect antibodies having reactivity therewith, or, alternatively, antibodies prepared in accordance with the present invention, may be employed to detect the encoded proteins or peptides, such as CHT.

[0410] The steps of various useful immunodetection methods have been described in the scientific literature, such as, e.g., Nakamura et al. (1987; incorporated herein by reference). Immunoassays, in their most simple and direct sense, are binding assays. Certain preferred immunoassays are the various types of enzyme linked immunosorbent assays (ELISAs), radioimmunoassays (RIA) and immunobead capture assay. Immunohistochemical detection using tissue sections also is particularly useful. However, it will be readily appreciated that detection is not limited to such techniques, and Western blotting, dot blotting, FACS analyses, and the like also may be used in connection with the present invention.

[0411] In general, immunobinding methods include obtaining a sample suspected of containing a protein, peptide or antibody, and contacting the sample with an antibody or protein or peptide in accordance with the present invention, as the case may be, under conditions effective to allow the formation of immunocomplexes.

[0412] The immunobinding methods of this invention include methods for detecting or quantifying the amount of a reactive component in a sample, which methods require the detection or quantitation of any immune complexes formed during the binding process. Here, one would obtain a CHT protein, peptide or a corresponding antibody, and contact it with an antibody or encoded protein or peptide, as the case may be, and then detect or quantify the amount of immune complexes formed under the specific conditions.

[0413] In terms of antigen detection, the biological sample analyzed may be any sample that is suspected of containing an antigen specific for a disorder such as a neuromuscular, autonomic or CNS disorder. The sample can be a tissue section or specimen, a homogenized tissue extract, an isolated cell, a cell membrane preparation, separated or purified forms of any of the above protein-containing compositions, or even any biological fluid that comes into contact with tissue such as blood.

[0414] Contacting the chosen biological sample with the protein, peptide or antibody under conditions effective and for a period of time sufficient to allow the formation of immune complexes (primary immune complexes) is generally a matter of simply adding the composition to the sample and incubating the mixture for a period of time long enough for the antibodies to form immune complexes with, i.e., to bind to, any antigens present, such as CHT. After this time, the sample-antibody composition, such as a tissue section, ELISA plate, dot blot or Western blot, will generally be washed to remove any non-specifically bound antibody species, allowing only those antibodies specifically bound within the primary immune complexes to be detected.

[0415] In general, the detection of immunocomplex formation is well known in the art and may be achieved through the application of numerous approaches. These methods are generally based upon the detection of a label or marker, such as any radioactive, fluorescent, biological or enzymatic tags or labels of standard use in the art. U.S. patents concerning the use of such labels include U.S. Pat. Nos. 3,817,837; 3,850,752; 3,939,350; 3,996,345; 4,277,437; 4,275,149 and 4,366,241, each incorporated herein by reference. Of course, one may find additional advantages through the use of a secondary binding ligand such as a second antibody or a biotinlavidin ligand binding arrangement, as is known in the art.

[0416] The encoded protein, peptide or corresponding antibody employed in the detection may itself be linked to a detectable label, wherein one would then simply detect this label, thereby allowing the amount of the primary immune complexes in the composition to be determined.

[0417] Alternatively, the first added component that becomes bound within the primary immune complexes may be detected by means of a second binding ligand that has binding affinity for the encoded protein, peptide or corresponding antibody. In these cases, the second binding ligand may be linked to a detectable label. The second binding ligand is itself often an antibody, which may thus be termed a “secondary” antibody. The primary immune complexes are contacted with the labeled, secondary binding ligand, or antibody, under conditions effective and for a period of time sufficient to allow the formation of secondary immune complexes. The secondary immune complexes are then generally washed to remove any non-specifically bound labeled secondary antibodies or ligands, and the remaining label in the secondary immune complexes is then detected.

[0418] Further methods include the detection of primary immune complexes by a two step approach. A second binding ligand, such as an antibody, that has binding affinity for the encoded protein, peptide or corresponding antibody is used to form secondary immune complexes, as described above. After washing, the secondary immune complexes are contacted with a third binding ligand or antibody that has binding affinity for the second antibody, again under conditions effective and for a period of time sufficient to allow the formation of immune complexes (tertiary immune complexes). The third ligand or antibody is linked to a detectable label, allowing detection of the tertiary immune complexes thus formed. This system may provide for signal amplification if this is desired.

[0419] c. Western Blot

[0420] It is contemplated that CHT proteins or peptides of the current invention can find utility in Western Blot analysis. Western Blot analysis can be used to determine the effectiveness of candidate substances in the modulation of high-affinity choline uptake. Preferred detection methods include chemiluminescence and chromagenic detection. Standard methods for Western Blot analysis can be found in, for example, Bollag et al., 1996 or Harlow et al. 1988, herein incorporated by reference.

[0421] d. ELISAs

[0422] As noted, it is contemplated that the CHT proteins or peptides of the invention, such as hCHT and mCHT, will find utility in ELISAs.

[0423] In one exemplary ELISA, antibodies binding to the encoded proteins of the invention are immobilized onto a selected surface exhibiting protein affinity, such as a well in a polystyrene microtiter plate. Then, a test composition suspected of containing a marker antigen, such as a hCHT, is added to the wells. After binding and washing to remove non-specifically bound immunocomplexes, the bound antigen may be detected.

[0424] Detection is generally achieved by the addition of a second antibody specific for the target protein, that is linked to a detectable label. This type of ELISA is a simple “sandwich ELISA”. Detection also may be achieved by the addition of a second antibody, followed by the addition of a third antibody that has binding affinity for the second antibody, with the third antibody being linked to a detectable label.

[0425] In another exemplary ELISA, the CHT or other samples suspected of containing a disease or disorder marker antigen is immobilized onto the well surface and then contacted with the antibodies of the invention. After binding and washing to remove non-specifically bound immunecomplexes, the bound antibody is detected. Where the initial antibodies are linked to a detectable label, the immunecomplexes may be detected directly. Again, the immunecomplexes may be detected using a second antibody that has binding affinity for the first antibody, with the second antibody being linked to a detectable label.

[0426] Another ELISA in which the proteins or peptides, such as CHT, are immobilized, involves the use of antibody competition in the detection. In this ELISA, labeled antibodies are added to the wells, allowed to bind to the CHT or related marker protein, and detected by means of their label. The amount of marker antigen in an unknown sample is then determined by mixing the sample with the labeled antibodies before or during incubation with coated wells. The presence of marker antigen in the sample acts to reduce the amount of antibody available for binding to the well and thus reduces the ultimate signal. This is appropriate for detecting antibodies in an unknown sample, where the unlabeled antibodies bind to the antigen-coated wells and also reduces the amount of antigen available to bind the labeled antibodies.

[0427] Irrespective of the format employed, ELISAs have certain features in common, such as coating, incubating or binding, washing to remove non-specifically bound species, and detecting the bound immunecomplexes. These are described as follows:

[0428] In coating a plate with either antigen or antibody, one will generally incubate the wells of the plate with a solution of the antigen or antibody, either overnight or for a specified period of hours. The wells of the plate will then be washed to remove incompletely adsorbed material. Any remaining available surfaces of the wells are then “coated” with a nonspecific protein that is antigenically neutral with regard to the test antisera. These include bovine serum albumin (BSA), casein and solutions of milk powder. The coating allows for blocking of nonspecific adsorption sites on the immobilizing surface and thus reduces the background caused by nonspecific binding of antisera onto the surface.

[0429] In ELISAs, it is more customary to use a secondary or tertiary detection means rather than a direct procedure. Thus, after binding of a protein or antibody to the well, coating with a non-reactive material to reduce background, and washing to remove unbound material, the immobilizing surface is contacted with the control clinical or biological sample to be tested under conditions effective to allow immunocomplex (antigen/antibody) formation. Detection of the immunocomplex then requires a labeled secondary binding ligand or antibody, or a secondary binding ligand or antibody in conjunction with a labeled tertiary antibody or third binding ligand.

[0430] To provide a detecting means, the second or third antibody will have an associated label to allow detection. Preferably, this will be an enzyme that will generate color development upon incubating with an appropriate chromogenic substrate. Thus, for example, one will desire to contact and incubate the first or second immunocomplex with a urease, glucose oxidase, alkaline phosphatase or hydrogen peroxidase-conjugated antibody for a period of time and under conditions that favor the development of further immunocomplex formation (e.g., incubation for 2 h at room temperature in a PBS-containing solution such as PBS-Tween).

[0431] In other embodiments, solution-phase competition ELISA is also contemplated. Solution phase ELISA involves attachment of CHT or a related peptide to a bead, for example a magnetic bead. The bead is then incubated with sera from human and animal origin. After a suitable incubation period to allow for specific interactions to occur, the beads are washed. The specific type of antibody is the detected with an antibody indicator conjugate. The beads are washed and sorted. This complex is the read on an appropriate instrument (fluorescent, electroluminescent, spectrophotometer, depending on the conjugating moiety). The level of antibody binding can thus by quantitated and is directly related to the amount of signal present.

[0432] e. Immunohistochemistry

[0433] The antibodies of the present invention, such as anti-CHT antibodies, also may be used in conjunction with both fresh-frozen and formalin-fixed, paraffin-embedded tissue blocks prepared from study by immunohistochemistry (1HC). For example, each tissue block consists of 50 mg of residual “pulverized” tumor. The method of preparing tissue blocks from these particulate specimens has been successfully used in previous IHC studies of various prognostic factors, e.g., in breast, and is well known to those of skill in the art (Brown et al., 1990; Abbondanzo et al., 1990; Allred et al., 1990).

[0434] Briefly, frozen-sections may be prepared by rehydrating 50 ng of frozen “pulverized” tumor at room temperature in phosphate buffered saline (PBS) in small plastic capsules; pelleting the particles by centrifugation; resuspending them in a viscous embedding medium (OCT); inverting the capsule and pelleting again by centrifugation; snap-freezing in −70° C. isopentane; cutting the plastic capsule and removing the frozen cylinder of tissue; securing the tissue cylinder on a cryostat microtome chuck; and cutting 25-50 serial sections containing an average of about 500 remarkably intact tumor cells.

[0435] Permanent-sections may be prepared by a similar method involving rehydration of the 50 mg sample in a plastic microfuge tube; pelleting; resuspending in 10% formalin for 4 h fixation; washing/pelleting; resuspending in warm 2.5% agar; pelleting; cooling in ice water to harden the agar; removing the tissue/agar block from the tube; infiltrating and embedding the block in paraffin; and cutting up to 50 serial permanent sections.

[0436] f. FACS Analyses

[0437] Fluorescent activated cell sorting, flow cytometry or flow microfluorometry provides the means of scanning individual cells for the presence of an antigen, such as CHT. The method employs instrumentation that is capable of activating, and detecting the excitation emissions of labeled cells in a liquid medium. FACS is unique in its ability to provide a rapid, reliable, quantitative, and multiparameter analysis on either living or fixed cells. The antibodies of the present invention provide a useful tool for the analysis and quantitation of markers of individual cells.

[0438] g. Green Fluourescent Protein Staining

[0439] Green fluorescent protein can be used to stain the cholinergic neurons and thereby allow for visual analysis of a targeted animal, culture, brain slice, etc. The use of green flurescent protein has been described in U.S. patent application Ser. No. 09/888,233 “Assay for Toxin Induced Neuronal Degeneration and Viability in C. elegans,” filed Jun. 22, 2001 and herein incorporated by reference. This application provides in vivo screening methods to detect and identify substances that affect neuronal viability, and/or prevent neurodegeneration, and/or confer neuroprotective effects using recombinant C. elegans expressing a detectable marker in neuronal sub-groups and neurotoxins specific to specific neuronal cells.

[0440] XIII. Pharmaceutical Preparations

[0441] Pharmaceutical compositions of the present invention comprise an effective amount of one or more hCHT or mCHT or more particularly one or more hCHT or mCHT inhibitors or additional agent dissolved or dispersed in a pharmaceutically acceptable carrier. The phrases “pharmaceutical or pharmacologically acceptable” refers to molecular entities and compositions that do not produce an adverse, allergic or other untoward reaction when administered to an animal, such as, for example, a human, as appropriate. The preparation of an pharmaceutical composition that contains at least one CHT or additional active ingredient will be known to those of skill in the art in light of the present disclosure, as exemplified by Remington's Pharmaceutical Sciences, 18th Ed. Mack Printing Company, 1990, incorporated herein by reference. Moreover, for animal (et al, human) administration, it will be understood that preparations should meet sterility, pyrogenicity, general safety and purity standards as required by FDA Office of Biological Standards.

[0442] As used herein, “pharmaceutically acceptable carrier” includes any and all solvents, dispersion media, coatings, surfactants, antioxidants, preservatives (et al., antibacterial agents, antifungal agents), isotonic agents, absorption delaying agents, salts, preservatives, drugs, drug stabilizers, gels, binders, excipients, disintegration agents, lubricants, sweetening agents, flavoring agents, dyes, such like materials and combinations thereof, as would be known to one of ordinary skill in the art (see, for example, Remington's Pharmaceutical Sciences, 18th Ed. Mack Printing Company, 1990, pp. 1289-1329, incorporated herein by reference). Except insofar as any conventional carrier is incompatible with the active ingredient, its use in the therapeutic or pharmaceutical compositions is contemplated.

[0443] The hCHT or mCHT may comprise different types of carriers depending on whether it is to be administered in solid, liquid or aerosol form, and whether it need to be sterile for such routes of administration as injection. The present invention can be administered intravenously, intradermally, intraarterially, intraperitoneally, intralesionally, intracranially, intraarticularly, intraprostaticaly, intrapleurally, intratracheally, intranasally, intravitreally, intravaginally, intrarectally, topically, intratumorally, intramuscularly, intraperitoneally, subcutaneously, subconjunctival, intravesicularlly, mucosally, intrapericardially, intraumbilically, intraocularally, orally, topically, locally, inhalation (et al. aerosol inhalation), injection, infusion, continuous infusion, localized perfusion bathing target cells directly, via a catheter, via a lavage, in cremes, in lipid compositions (et al., liposomes), or by other method or any combination of the forgoing as would be known to one of ordinary skill in the art (see, for example, Remington's Pharmaceutical Sciences, 18th Ed. Mack Printing Company, 1990, incorporated herein by reference).

[0444] The actual dosage amount of a composition of the present invention administered to an animal patient can be determined by physical and physiological factors such as body weight, severity of condition, the type of disease being treated, previous or concurrent therapeutic interventions, idiopathy of the patient and on the route of administration. The practitioner responsible for administration will, in any event, determine the concentration of active ingredient(s) in a composition and appropriate dose(s) for the individual subject.

[0445] In certain embodiments, pharmaceutical compositions may comprise, for example, at least about 0.1% of an active compound. In other embodiments, the an active compound may comprise between about 2% to about 75% of the weight of the unit, or between about 25% to about 60%, for example, and any range derivable therein. In other non-limiting examples, a dose may also comprise from about 1 microgram/kg/body weight, about 5 microgram/kg/body weight, about 10 microgram/kg/body weight, about 50 microgram/kg/body weight, about 100 ml crogram/kg/body weight, about 200 microgram/kg/body weight, about 350 microgram/kg/body weight, about 500 microgram/kg/body weight, about 1 milligram/kg/body weight, about 5 milligram/kg/body weight, about 10 milligram/kg/body weight, about 50 milligram/kg/body weight, about 100 milligram/kg/body weight, about 200 milligram/kg/body weight, about 350 milligram/kg/body weight, about 500 milligram/kg/body weight, to about 1000 mg/kg/body weight or more per administration, and any range derivable therein. In non-limiting examples of a derivable range from the numbers listed herein, a range of about 5 mg/kg/body weight to about 100 mg/kg/body weight, about 5 microgram/kg/body weight to about 500 milligram/kg/body weight, etc., can be administered, based on the numbers described above.

[0446] In any case, the composition may comprise various antioxidants to retard oxidation of one or more component. Additionally, the prevention of the action of microorganisms can be brought about by preservatives such as various antibacterial and antifungal agents, including but not limited to parabens (et al., methylparabens, propylparabens), chlorobutanol, phenol, sorbic acid, thimerosal or combinations thereof.

[0447] The hCHT or mCHT may be formulated into a composition in a free base, neutral or salt form. Pharmaceutically acceptable salts, include the acid addition salts, et al., those formed with the free amino groups of a proteinaceous composition, or which are formed with inorganic acids such as for example, hydrochloric or phosphoric acids, or such organic acids as acetic, oxalic, tartaric or mandelic acid. Salts formed with the free carboxyl groups can also be derived from inorganic bases such as for example, sodium, potassium, ammonium, calcium or ferric hydroxides; or such organic bases as isopropylamine, trimethylamine, histidine or procaine.

[0448] In embodiments where the composition is in a liquid form, a carrier can be a solvent or dispersion medium comprising but not limited to, water, ethanol, polyol (et al., glycerol, propylene glycol, liquid polyethylene glycol, etc), lipids (et al., triglycerides, vegetable oils, liposomes) and combinations thereof The proper fluidity can be maintained, for example, by the use of a coating, such as lecithin; by the maintenance of the required particle size by dispersion in carriers such as, for example liquid polyol or lipids; by the use of surfactants such as, for example hydroxypropylcellulose; or combinations thereof such methods. In many cases, it will be preferable to include isotonic agents, such as, for example, sugars, sodium chloride or combinations thereof.

[0449] In other embodiments, one may use eye drops, nasal solutions or sprays, aerosols or inhalants in the present invention. Such compositions are generally designed to be compatible with the target tissue type. In a non-limiting example, nasal solutions are usually aqueous solutions designed to be administered to the nasal passages in drops or sprays. Nasal solutions are prepared so that they are similar in many respects to nasal secretions, so that normal ciliary action is maintained. Thus, in preferred embodiments the aqueous nasal solutions usually are isotonic or slightly buffered to maintain a pH of about 5.5 to about 6.5. In addition, antimicrobial preservatives, similar to those used in ophthalmic preparations, drugs, or appropriate drug stabilizers, if required, may be included in the formulation. For example, various commercial nasal preparations are known and include drugs such as antibiotics or antihistamines.

[0450] In certain embodiments the hCHT or mCHT is prepared for administration by such routes as oral ingestion. In these embodiments, the solid composition may comprise, for example, solutions, suspensions, emulsions, tablets, pills, capsules (et al., hard or soft shelled gelatin capsules), sustained release formulations, buccal compositions, troches, elixirs, suspensions, syrups, wafers, or combinations thereof. Oral compositions may be incorporated directly with the food of the diet. Preferred carriers for oral administration comprise inert diluents, assimilable edible carriers or combinations thereof In other aspects of the invention, the oral composition may be prepared as a syrup or elixir. A syrup or elixir, and may comprise, for example, at least one active agent, a sweetening agent, a preservative, a flavoring agent, a dye, a preservative, or combinations thereof.

[0451] In certain preferred embodiments an oral composition may comprise one or more binders, excipients, disintegration agents, lubricants, flavoring agents, and combinations thereof In certain embodiments, a composition may comprise one or more of the following: a binder, such as, for example, gum tragacanth, acacia, cornstarch, gelatin or combinations thereof; an excipient, such as, for example, dicalcium phosphate, mannitol, lactose, starch, magnesium stearate, sodium saccharine, cellulose, magnesium carbonate or combinations thereof; a disintegrating agent, such as, for example, corn starch, potato starch, alginic acid or combinations thereof; a lubricant, such as, for example, magnesium stearate; a sweetening agent, such as, for example, sucrose, lactose, saccharin or combinations thereof; a flavoring agent, such as, for example peppermint, oil of wintergreen, cherry flavoring, orange flavoring, etc.; or combinations thereof the foregoing. When the dosage unit form is a capsule, it may contain, in addition to materials of the above type, carriers such as a liquid carrier. Various other materials may be present as coatings or to otherwise modify the physical form of the dosage unit. For instance, tablets, pills, or capsules may be coated with shellac, sugar or both.

[0452] Additional formulations which are suitable for other modes of administration include suppositories. Suppositories are solid dosage forms of various weights and shapes, usually medicated, for insertion into the rectum, vagina or urethra. After insertion, suppositories soften, melt or dissolve in the cavity fluids. In general, for suppositories, traditional carriers may include, for example, polyalkylene glycols, triglycerides or combinations thereof In certain embodiments, suppositories may be formed from mixtures containing, for example, the active ingredient in the range of about 0.5% to about 10%, and preferably about 1% to about 2%.

[0453] Sterile injectable solutions are prepared by incorporating the active compounds in the required amount in the appropriate solvent with various of the other ingredients enumerated above, as required, followed by filtered sterilization. Generally, dispersions are prepared by incorporating the various sterilized active ingredients into a sterile vehicle which contains the basic dispersion medium and/or the other ingredients. In the case of sterile powders for the preparation of sterile injectable solutions, suspensions or emulsion, the preferred methods of preparation are vacuum-drying or freeze-drying techniques which yield a powder of the active ingredient plus any additional desired ingredient from a previously sterile-filtered liquid medium thereof The liquid medium should be suitably buffered if necessary and the liquid diluent first rendered isotonic prior to injection with sufficient saline or glucose. The preparation of highly concentrated compositions for direct injection is also contemplated, where the use of DMSO as solvent is envisioned to result in extremely rapid penetration, delivering high concentrations of the active agents to a small area.

[0454] The composition must be stable under the conditions of manufacture and storage, and preserved against the contaminating action of microorganisms, such as bacteria and fungi. It will be appreciated that endotoxin contamination should be kept minimally at a safe level, for example, less that 0.5 ng/mg protein.

[0455] In particular embodiments, prolonged absorption of an injectable composition can be brought about by the use in the compositions of agents delaying absorption, such as, for example, aluminum monostearate, gelatin or combinations thereof. The composition may be combined with secondary agent which may be an agent used to treat a disease such as Parkinson's disease, Huntington's disease, Alzheimer's, schizophrenia or dysautonomia. The secondary agent may be a muscarinic agent, an antimusciarinic agent (ie. atropine, scopolamine, pirenzepine, blycopyrrolate methscopolamine, benztropine, homatropine cyclopentolate or eucatropine), a ganglionic agent, a neuromuscular blocking agent (i.e. tubocurarine, gallamine, pancuronium, atracurium, succinylcholine or decamethonium), a nicontinic agent or a cholinesterase inhibitor (i.e. physostigmine, neostigmine, pyridostigmine, edrophonium or ambenonium).

[0456] XIV. Kits

[0457] Any of the compositions described herein may be comprised in a kit. In a non-limiting example, a choline transporter, and additional agent, may be comprised in a kit.

[0458] The kits will thus comprise, in suitable container means, a choline transporter and a lipid, and/or an additional agent of the present invention.

[0459] The kits may comprise a suitably aliquoted choline transporter, lipid and/or additional agent compositions of the present invention, whether labeled or unlabeled, as may be used to prepare a standard curve for a detection assay. The components of the kits may be packaged either in aqueous media or in lyophilized form. The container means of the kits will generally include at least one vial, test tube, flask, bottle, syringe or other container means, into which a component may be placed, and preferably, suitably aliquoted. Where there are more than one component in the kit, the kit also will generally contain a second, third or other additional container into which the additional components may be separately placed. However, various combinations of components may be comprised in a vial. The kits of the present invention also will typically include a means for containing the choline transporter, lipid, additional agent, and any other reagent containers in close confinement for commercial sale. Such containers may include injection or blow-molded plastic containers into which the desired vials are retained.

[0460] Therapeutic kits of the present invention are kits comprising a choline transporter such as SEQ ID NO. 1-4 protein, polypeptide, peptide, inhibitor, gene, vector and/or other effector. Such kits will generally contain, in suitable container means, a pharmaceutically acceptable formulation of SEQ ID NO. 1-4 protein or polypeptides, and/or a gene and/or vector expressing any of the foregoing in a pharmaceutically acceptable formulation. The kit may have a single container means, and/or it may have distinct container means for each compound.

[0461] When the components of the kit are provided in one and/or more liquid solutions, the liquid solution is an aqueous solution, with a sterile aqueous solution being particularly preferred. The candidate substance, antibody or CHT such as SEQ ID NO. 2 or SEQ ID NO. 4 compositions may also be formulated into a syringeable composition. In which case, the container means may itself be a syringe, pipette, and/or other such like apparatus, from which the formulation may be applied to an infected area of the body, injected into an animal, and/or even applied to and/or mixed with the other components of the kit.

[0462] The container means will generally include at least one vial, test tube, flask, bottle, syringe and/or other container means, into which the candidate substance, antibody or CHT such as SEQ ID NO. 2 or SEQ ID NO. 4 formulation are placed, preferably, suitably allocated. The kits may also comprise a second container means for containing a sterile, pharmaceutically acceptable buffer and/or other diluent.

[0463] In further embodiments, the invention provides immunological kits for use in detecting substances which modulate high-affinity choline uptake, e.g., in biological samples. Such kits will generally comprise one or more substances that have immunospecificity for proteins or peptides, such as a hCHT peptide, encoded by the nucleic acid markers of disorders such as neuromuscular, autonomic or CNS disorders identified in the present invention.

[0464] Kits comprising antibodies, will be preferred in many cases. In more preferred embodiments, it is contemplated that the antibodies will be those that bind to the CHT epitopes. Monoclonal antibodies are readily prepared and will often be preferred. Where marker proteins or peptides are provided, it is generally preferred that they be highly purified.

[0465] In certain embodiments, the CHT protein or peptide, or the first antibody that binds to the CHT protein or peptide may be bound to a solid support, such as a gene-chip, microbead, column matrix or well of a microtitre plate.

[0466] The immunodetection reagents of the kit may take any one of a variety of forms, including those detectable labels that are associated with, or linked to, the given antibody or antigen itself Detectable labels that are associated with or attached to a secondary binding ligand are also contemplated. Exemplary secondary ligands are those secondary antibodies that have binding affinity for the first antibody or antigen.

[0467] Further suitable immunodetection reagents for use in the present kits include the two-component reagent that comprises a secondary antibody that has binding affinity for the first antibody or antigen along with a third antibody that has binding affinity for the second antibody, wherein the third antibody is linked to a detectable label.

[0468] As noted above in the discussion of antibody conjugates, a number of exemplary labels are known in the art and all such labels may be employed in connection with the present invention. Radiolabels such as [³H] hemicholinium-e, nuclear magnetic spin-resonance isotopes, fluorescent labels and enzyme tags capable of generating a colored product upon contact with an appropriate substrate are suitable examples.

[0469] The kits may contain antibody-label conjugates either in fully conjugated form, in the form of intermediates, or as separate moieties to be conjugated by the user of the kit.

[0470] The kits may further comprise a suitably aliquoted composition of the CHT protein or antigen, such as hCHT, whether labeled or unlabeled, as may be used to prepare a standard curve for a detection assay.

[0471] The kits of the invention, regardless of type, will generally comprise one or more containers into which the biological agents are placed and, preferably, suitable aliquoted. The components of the kits may be packaged either in aqueous media or in lyophilized form.

[0472] The container means of the kits will generally include at least one vial, test tube, flask, bottle, or even syringe or other container means, into which the antibody or antigen may be placed, and preferably, suitably aliquoted. Where a second or third binding ligand or additional component is provided, the kit will also generally contain a second, third or other additional container into which this ligand or component may be placed.

[0473] The kits of the present invention will also typically include a means for containing the antibody, antigen, and any other reagent containers in close confinement for commercial sale. Such containers may include injection or blow-molded plastic containers into which the desired vials are retained.

[0474] The following abbriviations are used throughout this specification: high-affinity choline uptake (HACU); acetylcholine (Ach); high affinity choline transporter (CHT); human CHT (hCHT, SEQ ID NO: 2); mouse CHT (mCHT, SEQ ID NO: 4); rat CHT (rCHT1, SEQ ID NO: 6); cDNA encoding the high-affinity choline transporter from Caenorhabditis elegans (CHOI); and hemicholinium-3 (HC-3).

[0475] As used herein in the specification, “a” or “an” may mean one or more. As used herein in the claim(s), when used in conjunction with the word “comprising,” the words “a” or “an” may mean one or more than one. As used herein “another” may mean at least a second or more.

### XV. EXAMPLES

[0476] The following examples are included to demonstrate preferred embodiments of the invention. It should be appreciated by those of skill in the art that the techniques disclosed in the examples which follow represent techniques discovered by the inventor to function well in the practice of the invention, and thus can be considered to constitute preferred modes for its practice. However, those of skill in the art should, in light of the present disclosure, appreciate that many changes can be made in the specific embodiments which are disclosed and still obtain a like or similar result without departing from the spirit and scope of the invention.

### Example 1

### Cloning of hCHT cDNA

[0477] Based on the DNA sequence information obtained from the Human Genome Sequence Database and rCHT1 (SEQ ID NO: 5), genomic sequences (GenBank Accession Number AC009933, SEQ ID NO: 13) predictive of a human homologue for rCHT were identified. Based on inferred coding exons, inventors designed non-degenerate oligonucleotide primers to isolate an hCHT cDNA (SEQ ID NO: 1). The sense primer of SEQ ID NO: 15 (RB855, ATAAAAATGGCTTTCCATGTGGAAGGACTG) overlaps the putative start codon and extends by 16 nucleotides on the 5′ end and II nucleotides on the 3′ end. The antisense primer of SEQ ID NO: 16 (RB852, TCACTGTAAATTATCTTCCAGTCCCAGACCC) overlaps the putative stop codon. hCHT cDNA was amplified by PCR (5 min at 95° C. followed by 35 cycles of 30 sec at 95° C., 30 sec at 60° C., and 4 min at 68° C. and finally a 7 min extension at 68° C.) using human spinal cord cDNA (Clontech) as template with Pfu Turbo DNA polymerase and the ProStar Ultra HF kit (Stratagene). The PCR amplified products were inserted the NotI and XhoI sites of pcDNA3 (Invitrogen and sequence of the inserted cDNA was determined using fluorescent dye terminators and an ABI310 automated DNA sequencer (Center for Molecular Neuroscience and Neurogenomics Core, Vanderbilt University). The nucleotide sequence of hCHT cDNA and inferred translation is given as SEQ ID NO:1 (GenBank accession number AF276871). Sequence alignments of hCHT, rCHT, and CHO-1 as well as other gene family members were performed with the MegAlign module of Lasergene software (DNASTAR).

[0478] The amino acid sequence of rCHT1 (SEQ ID NO: 6) was used to search the Human Genome Sequence Database for a potential human ortholog. A GenBank BLAST search yielded bacterial artificial chromosome (BAC) sequences SEQ ID NO: 13 and SEQ ID NO: 14 (AC009963 and AC023672) containing unannotated sequences that display 87% nucleotide identity to rCHT coding sequence with conserved translational initiation and termination sites. Using human spinal cord cDNA as template, we amplified by PCR a 1780 bp product whose sequence matches the inferred exons of the putative hCHT gene found in the BAC sequences. The presence of an inframe stop codon in the BAC sequence (SEQ ID NO: 13) 9 nucleotides 5′ of our predicted start codon supports the conclusion that hCHT protein initiates at the designated ATG. The hCHT cDNA encodes a protein of 580 amino acids (FIG. 4), a predicted mass (Mr) of 63,203 Da and a calculated isoletric point of 4.9. The hCHT nucleotide and amino acid sequence are given as SEQ ID NO: 1 and SEQ ID NO: 2 respectively.

[0479] Sequence analysis of the predicted hCHT protein using Kyte-Doolittle (Kyte et al., 1982), TopPred2 (von Heijne, 1992) and Signal P (Nielsen, et al., 1997) algorithms, predict the presence of 13 transmembrane spanning domains (FIGS. 3-4) and the presence of a signal peptide that would orient the initial 6 amino acids extracellularly. There are 3 canonical N-linked glycosylation residues, N69 and N301 are predicted to be localized extracellularly. It is noteworthy that SGLT1 and NIS were also originally predicted to have 12 TMDs with NH2 and COOH terminus oriented towards the cytoplasm (Dai et al., 1996; Turk et al., 1997). However, more recent N-linked glycosylation site mutagenesis and immunofluoroscence studies reveal the presence of an extracellular NH2 terminus (Turk et al., 1997; Levy et al., 1998). Recently, SGLT1 has been predicted to contain 14 TMDs with the last TMD established by a hydrophobic domain at the very COOH terminus (Turk et al., 1997). Unlike SGLT1, but more like NIS, hCHT lacks such a domain, resulting in cytoplasmic COOH terminus (Turk et al., 1997; Levy et al., 1998). Canonical sites for phosphorylation by protein kinase C are present on the putative cytoplasmic domain between TMD9 and TMD1O(S367 and S373) as well as in the COOH terminus (T558). Canonical sites for protein kinase A are also present between TMD7 and TMD8 (S263) and on the COOH terminus (S522 and S550). Moreover, there are an additional 12 serine and 10 threonine residues in predicted cytoplasmic domains of hCHT that may represent noncanonical sites for regulatory phosphorylation.

[0480] Sequence alignments reveal hCHT protein to exhibit 93% amino acid identity to rCHT1 and 51% amino acid identity to the C. elegans gene product CHO-1. Outside of putative species orthologs, hCHT is distantly related to the SLC5A family of solute carriers that includes the Na⁺-coupled glucose transporter 1 (SGLT1; 25% AA identity) (Turk et al., 1997; Hediger et al., 1987) and the Na⁺/I⁻-iodide symporter (NIS; 21% AA identity) (Dai et al., 1996).

### Example 2

### Cloning of mCHT cDNA

[0481] Degenerate oligonucleotides were used to amplify a 1780 bp product by RT-PCR from mouse spinal cord RNA. The PCR product comprises is what is expect for a full-length open reading frame for mCHT and exhibits a 98% nucleotide identity to rCHT1. BLAST analysis of the Celera Discovery System™ v3.01 mouse genomic DNA assembly using our mCHT cDNA yielded an identical sequence for the coding exons of mCHT and conserved intron/exon boundaries with the human CHT gene. The mCHT cDNA (GenBank accession number AF276872) encodes a protein of 580 amino acids and has a predicted mass of 63 kDa with a calculated isoelectric point of 4.9 (FIG. 2). Consistent with our predicted model for the secondary structure of hCHT (Apparsundaram et al., 2000) and the recently reported model for Limulus ChCoT (Wang et al., 2001), hydropathy analysis of mCHT amino acid sequence indicates the presence of 13 transmembrane domains (TMDs) with a short extracellular NH2 and large intracellular COOH terminus. There are 3 canonical sites for N-linked glycosylation with N69 and N301 oriented extracellularly. Canonical sites for phosphorylation by protein kinase C are present on the putative cytoplasmic domain between TMD9 and TMD10 (S367 and S373) as well as in the COOH terminus (T558). Canonical sites for protein kinase A are also present on the cytoplasmic (S263) and COOH terminus (S522 and S550). Sequence alignments reveal that the mCHT protein exhibits a 93% and 98% AA identity with hCHT and rCHT1, respectively and 50% and 46% AA identity with Caenorhabditis elegans CHO-1 and Limulus polyphemus ChCoT, respectively (FIG. 2). Overall there is 39% AA identity among all the known choline transporters and a 93% AA identity among mCHT, hCHT and rCHT1. Conserved residues are likely to play a role in choline recognition or in conserved aspects of substrate translocation. Together, these proteins constitute a new a family of proteins distantly related to the SLC5A family of solute carriers which includes the Na⁺-coupled glucose transporters SGLT1 (25% amino acid identity) and Na⁺/I⁻-Symporter (NIS; 21% amino acid identity) (Turk et al., 1997; Dai et al., 1996).

[0482] The “knockout” of the mouse choline transporter gene is shown in FIG. 5. This figure depicts the gene before and after creation of the knockout line. Enhanced GFP (EGFP) was introduced into the line to allow for regulated GFP production from the endogenous choline transporter promoter. When cut with Eco RV and probed with the 5′ external probe the DNA from a targeted ES cell clone should give a 7 kb wild type allele band size and 5.3 kb targeted allele band size.

### Example 3

### Chromosomal Localization

[0483] The chromosomal localization of the hCHT gene was determined by radiation hybrid mapping (Stewart, et al., 1997). Briefly, oligonucleotide primers were selected to amplify a 616 bp fragment of genomic DNA corresponding to a region that overlaps with the hCHT1 stop codon. The sense primer RB885 (5′-CTGTGTATGGGCTCTGGTA CC -3′) is complementary to bases 1202-1220 of the hCHT coding sequence. The antisense primer of SEQ ID NO: 17 (RB934, 5′-GCTGCATACCATCTCTCC-3′) was designed based on analysis of the genomic sequence immediately 3′ from the hCHT stop codon (SEQ ID NO: 19, GenBank Accession Number AC009963). PCR mapping with SEQ ID NOS: 17-18 was performed using the Stanford G3 Human/Hamster Radiation Hybrid panel (Research Genetics) as template. The PCR conditions were: 5 min at 95° C. followed by 35 cycles of 30 sec at 95° C., 30 sec at 60° C., and 30 sec at 72° C. and finally a 7 min extension at 72° C. PCR products were denatured for 30 min at 37° C. in a solution of 0.4 N NaOH/25 mM EDTA and blotted onto Hybond N nylon membrane (Amersham). The blot was UV cross-linked (Stratalinker, Stratagene) and then baked at 80° C. under vacuum for 30 min and then hybridized with a 463 bp hCHT KpnI/Stul restriction fragment (bp 1221-1684), labeled by random priming (Prime-It II, Stratagene) in the presence of [³²P]-adCTP (Amersham). Hybridization was performed for 1 hour at 68° C. in ExpressHyb (Clontech) with a probe concentration of 10⁶ cpm/ml. The membrane was washed to a final stringency of 0.1×SSC 0.1%SDS for 1 hour at 68° C. prior to X-ray film development. Hybridization results were submitted for scoring on the Stanford Human Genome Center (SHGC) G3 radiation hybrid panel (shgc. stanford. edu/RH/index.html).

[0484] Altered cholinergic function is a feature of multiple cognitive, neuromuscular, motor and autonomic disorders (Coyle et al, 1983; Calabresi et al., 2000; Tandon 1999; Lange et al., 1992; Baron et al., 1996; Rodrigpez-Puertas et al., 1994; Alvarez et al., 1996). Assessment of the involvement of hCHT as a risk factor in such syndromes first requires the high resolution mapping of the hCHT gene. Using human and hamster genomic DNA, the inventors defined PCR conditions such that oligonucleotide primers specifically amplify a 616 bp product from human but not from hamster templates. This allowed for the assessment of the distribution of human specific amplicons on the SHGC radiation human/hamster hybrid panel, with amplifications confirmed as hCHT-derived by hybridization with a hCHT cDNA probe. Results revealed that the hCHT1 locus is tightly linked to markers of SEQ ID NOS: 20-21 on chromosome 2 (D2S340, GenBank Accession Number Z23978 and D2S176, GenBank Accession Number Z17178). The proximity of hCHT to these two markers corresponds to a cytogenetic location of 2q12. In addition, a search of BAC clone of SEQ ID NO: 19 (RP11-368F12, AC009963) which contains the hCHT gene, reveals that this BAC also encodes a portion of the Ran binding protein 2 (RanBP2) gene. RanBP2 has been localized with high resolution to 2q12 between SEQ ID NO: 20 and SEQ ID NO: 22 (D2S1893, GenBank Accession Number Z53730) by a combination of fluorescence in situ hybridization (FISH) analysis, sequence analysis, and physical mapping (Nothwang et al., 1998).

[0485] To ascertain the expression pattern and possible mRNA heterogeneity of mCHT, a Northern analysis was done using as a probe a 547-bp cDNA fragment corresponding to the most 3′ region of the mCHT coding sequence. Consistent with the distribution of cholinergic cell bodies in mouse CNS (Erickson et al., 1994; Naciff et al., 1997), the Northern blot analysis revealed a restricted regional distribution of mCHT mRNA as a single transcript of 5 kb in spinal cord, brainstem, midbrain and striatum (FIG. 6). No hybridization was evident in cerebellum, kidney, rat pheochromocytoma PC 12, and human neuroblastoma LA-N-2, despite evidence of control hybridization with GAPDH probe. Studies with CHT fusion protein and peptide-directed antibodies (Apparsundaram et al., 2001) also support a localization of CHT protein in cholinergic soma and terminals.

### Example 4

### RT-PCR for CHT cDNA

[0486] Based on the sequence information of rCHT1 and the information provided by human genomic sequence database (SEQ ID NO: 19), degenerate oligonucleotides were designed to be suitable for the amplification of the full open reading frame of mCHT from mouse spinal cord RNA. The sense primer (SEQ ID NO: 26, RB892 5′-CTGGATCCAAAATGG/CCTTTCCATGTA/GGAAGG-3′) overlaps the putative start codon (underlined) and extends by 21 nucleotides on the 5′ end and 7 nucleotides on the 3′ end. The antisense primer (SEQ ID NO: 27, RB893; 5′-GACTCGAGGTCAC/TTGTAAA/GTTATCTTCAGTCCC-3′) begins 15 bases 3′ of the putative stop codon (underlined). Mouse spinal cord total RNA was isolated using TRIZOL reagent (Life Technologies) and the RT-PCR amplification was carried out using the Prostar Ultra HF RT-PCR system (Stratagene) using oligo dT primers following manufacturer's protocols. PCR amplified products from mouse spinal cord were inserted into pcDNA3 (Invitrogen) between the NotI and XhoI sites and the nucleotide sequences of the inserted cDNA was determined using fluorescent dye terminators and an ABI310 automated DNA sequencer (Center for Molecular Neuroscience Neurogenomics Core, Vanderbilt University). The nucleotide sequence of mCHT cDNA and inferred translation can be obtained in SEQ ID NO: 23. Comparisons against mouse genomic DNA to validate cDNA sequence and to establish intron/exon boundaries were made using the Celera Discovery System™ v3.01 database assembly of the mouse genome. Sequence alignments of the mCHT orthologs were performed with version 1.6.3 of Lasergene (DNAStar, Inc.)

### Example 5

### Northern Analysis

[0487] The regional distribution of hCHT mRNA was examined using the human brain multiple tissue Northern Brain Blot II panel (Clontech). A 463 bp cDNA probe corresponding to hCHT bases 1221-1684(KpnI/Stul restriction fragment) was labeled with by random priming (Prime-It II, Stratagene) in the presence of [α-³²P] CTP (Amersham). Hybridization was carried out for 1 hour at 68° C. in Expresshyb (Clontech) with a probe concentration of 1.5×10⁶ cpm/ml. The membrane was washed at high stringency (30 min at 25° C. in 2×SSC 0.05% SDS followed by 1 hour at 68° C. in 0.1×SSC 0.1% SDS) and exposed to X-ray film (Kodak X-AR) for 112 hours before development. To validate evenness of loading, the blot was reprobed using a human α-actin cDNA (Clontech) probe at 10⁶ cpm/ml.

[0488] To examine the distribution of hCHT mRNA in human brain, a Northern Blot analysis was done using a 463 bp fragment comprising the 3′ end of our hCHT1 cDNA Results show HCHT mRNA to exhibit a restricted regional distribution in the CNS, consistent with the distribution of cholinergic cell bodies. Thus, a single transcript of 5 kb was detected in the putamen, spinal cord, and medulla (FIG. 7). This pattern of expression is consistent with the distribution of cholinergic neurons including the large, aspiny interneurons of the basal ganglia and the motoneurons of the midbrain, brainstem and spinal cord (Kato et al., 1985; Mizukawa et al., 1986; Mesulam et al., 1992). No hybridization was evident in temporal lobe, frontal lobe, occipital lobe, cerebral cortex and cerebellum despite evidence of control hybridization products with α-actin. (FIG. 7).

[0489] Expression of mCHT mRNA was determined using a Northern Blot analysis for different tissues as shown in FIG. 8. GAPDH is used as a positive control for mRNA loading. Western Blotting was also perfomed with mCHT with affinity purified antibody 97520 (FIG. 9). This analysis reveals a single 70 kDa band in cholinergic tissues distributed in accord with the known distribution of cholinergic terminals. The immunizing peptide corresponds to the human, mouse, and rat CHT C-terminus 15 amino acids (SEQ ID NO: 25). No such band was detected in kidney as a negative control.

### Example 6

### Radioligand Binding Assays

[0490] COS-7 cells were transfected with a pcDNA3 vector containing hCHT cDNA using the FuGene 6 transfection reagent (Roche Diagnostics) following the manufacturer's protocols. Briefly, COS-7 cells were cultured in Dulbecco's modified Eagles' medium (DMEM) supplemented with 10% fetal bovine serum (Hyclone), 100 μg/ml of penicillin and streptomycin at a density of 3-4 million cells in 150 mm culture dishes or 5×10⁴ cells per well in 24 well dishes (Falcon). After 24 hr, cells were transfected and 48 hr later, the cells were harvested and processed for membrane binding and whole cell or vesicle transport assays.

[0491] Monolayers of hCHT transfected COS-7 cells were washed with 30 ml of HTE buffer and harvested in 10 ml of homogenization buffer (0.32 M sucrose in HTE buffer). Cells were homogenized at 20,000 rpm for 25 sec using a Polytron tissue homogenizer (Brinkman). The homogenate was centrifuged at 100,000×g for 45 min at 4° C. The resulting pellet was suspended in 2 ml of HTE buffer, assayed for protein content (Bradford method; BioRad) and 50 μg of the membrane suspension (1 μg/pl) was transferred to each tube in triplicate. Unless otherwise indicated, all binding assays were performed in the presence of 150 mM NaCl in HTE buffer. Assays were initiated by the addition of [³H]HC-3 (127 Ci per mmol; NEN Life Science Products, 10 nM final concentration). After a 1 hr incubation at room temperature, membranes were rapidly filtered through glass fiber GF/B filters (Brandel) soaked in 0.3% polyethylenimine (Sigma) in HTE buffer and accumulated radioactivity was quantified using liquid scintillation spectrometry (Packard). To test the ion dependence of hCHT binding activity, Na⁺ was replaced in the assay buffer with equimolar concentrations of Li⁺ whereas Cl⁻was replaced with equimolar concentrations of isethionate. Non-specific binding was quantified by measuring [³H] HC-3 binding in the presence of 1 μM unlabeled HC-3 and subtracted from the total counts to yield specific binding. Data for binding and transport assays (see below) were analyzed using nonlinear least squares curve fitting and Scatchard transformations (Kaleidagraph, Abelbeck).

[0492] The radiolabeled HACU antagonist [³H]HC-3 has been used to identify CHT protein in human brain membranes (Pascual et al., 1990). Using [³H]HC-3, it was confirmed that the presence of hCHT protein in hCHT1-transfected COS-7 membranes (FIGS. 10A,B). As compared to vector-transfected cells, transfection of hCHT cDNA produced marked increase in [³H]HC-3 binding in membrane fractions of COS-7 cells (data not shown). The binding of [³H]HC-3 is saturable (FIG. 10A) and Scatchard analyses of [³H]HC-3 binding indicate single site kinetics (Hill coefficient n=0.99) with an equilibrium dissociation constant (Kd) of 4 nM. Replacement of either Na⁺ or Cl⁻ with lithium or isethionate, respectively, reduced [³H]HC-3 binding to levels seen in vector-transfected cells (data not shown). The low level of non-specific [³H]HC-3 binding detected in vector transfected cells is also insensitive to the removal of either Na⁺ or Cl⁻. Unlabeled HC-3, and choline dose-dependently inhibit [³H] HC-3 binding in hCHT transfected COS-7 cell membranes with Hill coefficients not significantly different from 1 (FIG. 10B). The Ki values for HC-3, choline and ACh in inhibiting [³H]HC-3 binding were 4 nM, 21μM and 433 μM, respectively.

### Example 7

### Transport Assays for hCHT

[0493] To assay CHT activity in resealed membrane vesicles from hCHT-transfected mammalian cells, the inventors transiently transfected COS-7 cells with hCHT as described herein above and prepared membrane fractions as described for binding assays. After obtaining the membrane fractions, resealed membrane vesicles were prepared as described by Fisher et al., 1992 (Fishe et al., 1992) with slight modifications. The membrane pellets were resuspended in 2 ml of HTE buffer (˜2 μg/μl) and the suspension was rotated gently at 4° C. for 45 min. Membrane vesicle suspensions were centrifuged (27,000×g) for 20 min at 4° C. and the resulting pellet suspended in 2 ml of Na+ and Cl⁻ free HTE buffer. Protein content of the suspension was determined (Bradford; BioRad) and 50 μg of the vesicle suspension (1 μg/μl) was transferred to each tube for triplicate assays. [³H]choline transport assays were initiated by the addition of [³H]choline and NaCl diluted in HTE buffer to reach a final concentration of 20 nM and 150 mM, respectively. After a 5 min incubation at room temperature, vesicles were rapidly filtered through Whatman GF/B filters soaked in 0.3% polyethylenimine in HTE buffer and the accumulated radioactivity quantified as described for binding assays. In experiments designed to determine the ion-dependence of choline transport, Na⁺ was replaced with equimolar concentrations of Li⁺ and Cl⁻ was replaced with equimolar concentrations of isethionate. In all experiments, non-specific uptake was quantified by determining uptake in the presence of 1 μM HC-3 and subtracted from the total uptake to yield specific transport.

[0494] Initial transport studies in cRNA-injected Xenopus laevis oocytes and intact, transfected COS-7 cells demonstrated a modest increase in [³H]choline uptake, with activity too low to permit extensive kinetic or pharmacologic studies. We hypothesized that intracellular retention of CHTs in a cytoplasmic pool might be limiting choline transporter activity measurements with intact cells. Therefore, we determined CHT-mediated [³H]choline transport using resealed membrane vesicles prepared from total cell membranes. In contrast to intact cell studies, we readily detected hCHT-mediated choline transport activity in resealed membrane vesicles prepared from hCHT transfected COS-7 cells but not in vesicles prepared from vector transfected controls and addition of HC-3 reduced [³H]choline uptake to levels seen in vector transfected COS-7 membrane vesicles (data not shown). The specific uptake of [³H]choline is saturable and displays single-site kinetics (Hill coefficient n=0.99) with a Km of 1.6 μM (FIG. 10C). Replacement of either Na⁺ with Li⁺ or Cl⁻ with isethionate reduced [³H]choline uptake to levels seen in vector-transfected cells (data not shown). Unlabeled HC-3, choline and ACh inhibited [³H]choline uptake in a dose-dependent fashion (FIG. 4D), yielding Kᵢ values of 5 nM, 123 nM, and 570 nM respectively.

### Example 8

### Transport Assays for MCHT

[0495] Initial transport studies in intact, transfected cells revealed that induced choline transport activity was too low to permit reliable kinetic analyses or pharmacological characterization. Similar to hCHT (Apparsundaram et al., 2000) functional mCHT protein is likely sequestered in non-trafficked, intracellular membranes. In order to access the intracellular pool of CHTs, CHT transport was evaluated in resealed membrane vesicles prepared from total cell membranes. Using this strategy, a specific accumulation of labeled choline that was absent from vesicles prepared from vector transfected COS-7 cells was readily detected. Furthermore, the presence of 1 μM HC-3 reduced choline uptake to levels seen in vector transfected COS-7 membrane vesicles. The specific uptake of labeled choline was found to be saturable and of high-affinity (FIG. 11A). The Eadie-Hofstee plot reveals the presence of a single-site for the specific uptake of choline with Km 2 μM. As with hCHT (Apparsundaram et al., 2000; Okuda et al., 2000), replacement of either Na⁺ with Li⁺ or Cl⁻ with isoethionate reduced choline uptake to levels seen in vector-transfected cells. Co-application of unlabeled HC-3 and choline dose-dependently inhibited mCHT-mediated choline uptake (FIG B). The IC₅₀ for HC-3 and choline at mCHT were 5 nM and 123 nM, respectively. ACh in the presence of cholinesterase blockade also inhibited CHT-mediated choline uptake with an IC₅₀ of 570 μM.

[0496] The binding characteristics of the selective CHT antagonist HC-3 were also determined (Tamaru et al., 1988). As compared to vector-transfected cells, expression of mCHT cDNA in COS-7 cells produced a marked increase in [³H] HC-3 binding in membrane fractions. Like choline transport, binding of [³H] HC-3 was of high affinity and saturable (FIG. 6). Scatchard transformation of [³H] HC-3 binding in mCHT expressing membranes indicated single site kinetics with an equilibrium dissociation constant (Kd) of 5 nM. Replacement of either Na⁺ or Cl⁻ with Li⁺ or isoethionate reduced [³H] HC-3 binding in mCHT expressing cells to levels seen in vector-transfected cells (data not shown). Unlabeled HC-3, choline and ACh (in the presence of physostigmine) dose-dependently inhibit [³I] HC-3 binding in mCHT transfected COS-7 cell membrane. The Kᵢ values for HC-3, choline and ACh in inhibiting [³H] HC-3 binding were 5 nM, 22 μM and 433 μM, respectively (FIG. 11D).

[0497] The cloning and functional expression studies as describe herein, along with the pattern of mRNA expression revealed in Northern hybridizations, suggest that mCHT encodes the protein that supports HACU in murine cholinergic neurons. The availability of mCHT and access to its genomic DNA should permit the generation of models useful for the study of high-affinity choline transport function and regulation in vitro and in vivo.

### Example 9

### Anti-ChT Antibody Generation

[0498] Polyclonal antibodies were raised in rabbits against the peptide of SEQ ID NO: 25 (VDSSPEGSGTEDNLQ, Research Genetics). This sequence corresponds to the COOH terminal 15 amino acids of the human, mouse, and rat choline transporters SEQ ID NOS: 2, 4 and 6 (Genbank Accession Numbers AF276871, AF276872, and AB030947 respectively). Antibodies were purified from the crude serum via affinity chromatography over an Affi-Gel 15 column (BioRad) to which was conjugated the immunizing peptide. Antibodies were eluted from the column in 0. 15M glycine pH 2.5 and 1 ml fractions were collected and rapidly neutralized in 2M Tris (Sigma) pH 8.0. The fractions containing the peak absorbance at 280 nm were pooled and dialyzed overnight against PBS. Goat serum (Jackson ImmunoResearch Laboratories) was added to 10% (v/v) and aliquots were stored at −20° C. Antibodies were also effectively purified over an affinity column consisting of a GST fusion protein containing the hCHT COOH terminal 80 amino acids covalently attached to Reactigel beads (Pierce).

### Example 10

### Immunocytochemistry

[0499] Immunocytochemistry reveal cholinergic neurons, terminals, fibers, synapses and other tissues associated with cholinergic function. Green fluorescent protein, or other visible markers can be used, suc a β-glacticidase (See, for example U.S. patent application Ser. No. 09/888,233). Images of ChTt-ir in striatum and basal ganglia (FIG. 12), septum (FIG. 13), hipocampus. (FIG. 14), medulla oblongata (FIG. 15), neuromuscular junction of the diaphragm (FIG. 16) and the neuromuscular junction of the bladder (FIG. 17) demonstrate the use of immunocytochemistry for determining cholinerigic associated tissues. These images reveal the choline transporter antibodies stainging of cholinergic neurons and terminals in the mouse striatum and basal forebrain (FIG. 12) cholinergic neurons and processes in the septal nucleus (FIG. 13), cholinergic fibers in the mouse hippocampus (FIG. 14), cholinergic motor neurons in the brainstem (FIG. 15), cholinergic synapses on muscle cell (FIG. 16) and parasympathetic neuronal terminals on smooth muscle in the bladder.

[0500] All of the methods disclosed and claimed herein can be made and executed without undue experimentation in light of the present disclosure. While the compositions and methods of this invention have been described in terms of preferred embodiments, it will be apparent to those of skill in the art that variations may be applied to the methods and in the steps or in the sequence of steps of the method described herein without departing from the concept, spirit and scope of the invention. More specifically, it will be apparent that certain agents which are both chemically and physiologically related may be substituted for the agents described herein while the same or similar results would be achieved. All such similar substitutes and modifications apparent to those skilled in the art are deemed to be within the spirit, scope and concept of the invention as defined by the appended claims.

### REFERENCES

[0501] The following references, to the extent that they provide exemplary procedural or other details supplementary to those set forth herein, are specifically incorporated herein by reference.

[0502] Akil, H.; Watson, S. J.; Young, E.; Lewis, M. E.; Khachaturian, H. and Walker, J. M. Endogenous opioids: Biology and function. Annual Review of Neuroscience 1984, 7: 223-255.

[0503] Alvarez, E., Ferrer, T., Perez-Conde, C., Lopez-Terradas, J. M., Perez-Jimenez, A., and Ramos, M. J. (1996) Neuropediatrics 27:26-31.

[0504] Angel et al., Cell, 49:729, 1987b.

[0505] Angel et al., Mol. Cell. Biol., 7:2256, 1987a.

[0506] Antibodies: A Laboratory Manual, Cold Spring Harbor Laboratory, 1988

[0507] Apparsundaram, S., Ferguson, S., and Blakely, R. D. (2000) Soc Neurosci. Abstr. 26:15350.

[0508] Apparsundaram, S., Ferguson, S., and Blakely, R. D. (2001) Biochemical Society Transactions, in press.

[0509] Apparsundaram, S., Ferguson, S. M., George, A. L., Blakely R. D. “Molecular cloning of a human, hemicholinium-3-senstitive choline transporter” Biochem. Biophys. Research Comm. 276, 862-867, 2000.

[0510] Atchison and Perry, Cell, 48:121, 1987.

[0511] Attali et al, J. Neurochem. 52:360, 1989.

[0512] Atweh, S., Simon, J. R., and Kuhar, M. J. (1975) Life Sciences 17:1535-1544.

[0513] Avidor-Reiss, Nevo, Levy, Pfeuffer, Vogel, “Chronic opioid treatment induces adenylyl cyclase V superactivation,” Journal of Biological Chemistry, 271:21309-21315, 1996.

[0514] Baichwal and Sugden, In: Gene Transfer, Kucherlapati R, ed., New York, Plenum Press, pp. 117-148, 1986.

[0515] Banerji et al., Cell, 27:299, 1981.

[0516] Banerji et al., Cell, 35:729, 1983.

[0517] Barnwell, J. F., Chaudhuri, G., Townsel, J. G. “Cloning and sequencing of a cDNA encoding a novel member of the human brain GABA/noradrenaline neurotransmitter transporter family” Gene 159, 287-288, 1995.

[0518] Baron, R., and Engler, F. (1996) J Neurol 243:18-24.

[0519] Benvenisty and Neshif, Proc. Nat. Acad. Sci. USA, 83:9551-9555, 1986.

[0520] Berkhout et al., Cell, 59:273, 1989.

[0521] Bero et al., Mol Pharmacol., 34:614, 1988.

[0522] Bertolucci et al., Neurosci. Abstr. 18L1368.

[0523] Berzal-Herranz et al., Genes and Devel., 6:129-134, 1992.

[0524] Bierer, L. M., Haroutunian, V., Gabriel, S., Knott, P. J., Carlin, L. S., Purohit, D. P., Perl,

[0525] D. P., Schmeidler, J., Kanof P., Davis, K. L., J. Neurochem, 64, 749-760, 1995.

[0526] Blanar et al., EMBO J., 8:1139, 1989.

[0527] Blusztajn, J. K. (1998) Science 281:794-5.

[0528] Bodine and Ley, EMBO J., 6:2997, 1987.

[0529] Bollag, D. M., Rozycki, M. D., and Edelstein, S. J. (1996). Protein Methods, Second Edition. New York: Wiley-Liss, 195-227.

[0530] Boshart et al., Cell, 41:521, 1985.

[0531] Bosze et a., EMBO J., 5:1615, 1986.

[0532] Bradbury et al., Nature 260:165, 1976.

[0533] Braddock et al., Cell, 58:269, 1989,

[0534] Breer, H., and Knipper, M. (1990) The Journal of Neurobiology 21:269-275.

[0535] Brogden, Speight, Avery, “Pentazocine: a review of its pharmacological properties, therapeutic efficacy and dependence liability,” Drugs, 5:6-91, 1973.

[0536] Bulla and Siddiqui, J. Virol., 62:1437, 1986.

[0537] Calabresi, P., Centonze, D., Gubellini, P., Pisani, A., and Bernardi, G. (2000) Trends Neurosci 23:120-6.

[0538] Campbell and Villarreal, Mol. Cell. Biol., 8:1993, 1988.

[0539] Campere and Tilghman, Genes and Dev., 3:537, 1989.

[0540] Campo et a., Nature, 303:77, 1983.

[0541] Cancela, J. M., Bertrand, N., and Beley, A. (1995) Biochemical And Biophysical Research Communications 213:944-9.

[0542] Capaldi et al., Biochem. Biophys. Res. Comm., 76:425, 1977.

[0543] Carter and Flotte, Ann. N.Y. Acad. Sci., 770:79-90, 1995.

[0544] Cech et al., “In vitro splicing of the ribosomal RNA precursor of Tetrahymena: involvement of a guanosine nucleotide in the excision of the intervening sequence,” Cell, 27:487-496, 1981.

[0545] Celander and Haseltine, J. Virology, 61:269, 1987.

[0546] Celander et al., J. Virology, 62:1314, 1988.

[0547] Chandler et al., Cell, 33:489, 1983.

[0548] Chang et al., “Foreign gene delivery and expression in hepatocytes using a hepatitis B virus vector,” Hepatology, 14:134A, 1991.

[0549] Chang et al., Mol. Cell. Biol., 9:2153, 1989.

[0550] Chatterjee et al., Proc. Natl. Acad. Sci. USA., 86:9114, 1989.

[0551] Chen and Okayama, Mol. Cell Biol., 7:2745-2752, 1987.

[0552] Choi et al., Cell, 53:519, 1988.

[0553] Chowrira et al, “In vitro and in vivo comparison of hammerhead, hairpin, and hepatitis delta virus self-processing ribozyme cassetyes,” J. Biol. Chem., 269:25856-25864, 1994.

[0554] Chowrira et al., Biochemistry, 32:1088-1095, 1993.

[0555] Clark, Voulgaropoulou, Fraley, and Johnson, “Cell lines for the production of recombinant adeno-associated virus,” Human Gene Therapy, 6:1329-1341, 1995.

[0556] Coffin, “Retroviridae and their replication,” In: Virology, Fields et al. (eds.), New York: Raven Press, pp. 1437-1500, 1990.

[0557] Coombs, Saunders, Lachance, Savage, Ragnarsson, Jensen, “Intrathecal morphine tolerance: Use of intrathecal clonidine, DADLE, and intraventricular morphine,” Anesthesiology, 62: 358-363, 1985.

[0558] Costa et al, Mol. Cell. Biol., 8:81, 1988.

[0559] Cotecchiaetal. Proc. Natl.l Acad. Sci. USA 85:7159, 1988.

[0560] Couch et al., “Immunization with types 4 and 7 adenovirus by selective infection of the intestinal tract,” Am. Rev. Resp. Dis., 88:394-403, 1963.

[0561] Coupar et al, “A general method for the construction of recombinant vaccinia virus expressing multiple foreign genes,” Gene, 68:1-10, 1988.

[0562] Coyle, J. T., Price, D. L., and DeLong, M. R. (1983) Science 219:1184-90.

[0563] Cripe et al, EMBO J., 6:3745, 1987.

[0564] Culotta and Hamer, Mol. Cell. Biol., 9:1376, 1989.

[0565] Dai, G., Levy, O., and Carrasco, N. (1996) Nature 379:458-459.

[0566] Dai, G., Levy, O., and Carrasco, N. (1996) Nature 379:458-60.

[0567] Dandolo et al., J. Virology, 47:55, 1983.

[0568] De Villiers et al., Nature, 312:242, 1984.

[0569] Deschamps et al., Science, 230:1174, 1985.

[0570] Di Chiara et al., Trends Pharmacol. Sci., 13:185, 1992.

[0571] Dohlman, Annu. Rev. Biochem., 60:166-170; 174-s176; 653-688, 1991.

[0573] Dohlman, Biochemistry, 26:2657, 1987.

[0574] Dubensky et al., Proc. Nat. Acad. Sci. USA, 81:7529-7533, 1984.

[0575] Duvoisin, Arch. Neurol., 17: 124, 1967

[0576] Edbrooke et al., Mol. Cell. Biol., 9:1908, 1989.

[0577] Edlund et al., Science, 230:912, 1985.

[0578] Elliott, Hynansky, Inturrisi, “Dextromethorphan attenuates and reverses analgesic tolerance to morphine,” Pain, 59:361-368, 1994.

[0579] EPA 320,308

[0580] EPA 329,822

[0581] Erickson, J. D., Varoqui, H., Schafer, M. K. H., Modi, W., Diebler, M., Weihe, E., Rand, J., Eiden, L. E., Bonner, T. I. and Usdin, T. B. (1994) The Journal of Biological Chemistry 269, 21929-21932

[0582] Fechheimer et al., Proc. Natl. Acad. Sci. USA, 84:8463-8467, 1987.

[0583] Feng and Holland, Nature, 334:6178, 1988.

[0584] Ferkol et al., FASEB J., 7:1081-1091, 1993.

[0585] Fibiger, H. C. (1991) Trends in Neuroscience 14:220-223.

[0586] Firak and Subramanian, Mol. Cell. Biol., 6:3667, 1986.

[0587] Fisher, A. B., Dodia, C., Chander, A., and Kleinzeller, A. (1992) Am J Physiol 263:C1250-7.

[0588] Flotte, Afione, Conrad, McGrath, Solow, Oka, Zeitlin, Guggino, and Carter, “Stable in vivo expression of the cystic fibrosis transmembrane conductance regulator with an adeno-associated virus vector,” Proc Natl. Acad. Sci. USA, 90:10613-10617, 1993.

[0589] Foecking MK, Hofstetter H. Gene. 45(1):101-105, 1986.

[0590] Foley, “Opioid analgesics in clinical pain management. In: Handbook of Experimental Pharmacology, Herz, (Ed.), Vol. Vol. 104/II: Opioids II., Springer-Verlag, Berlin, pp. 693-743, 1993.

[0591] Forster and Symons, “Self-cleavage of plus and minus RNAs of a virusoid and a structural model for the active sites,” Cell, 49:211-220, 1987.

[0592] Forster and Symons, “Self-cleavage of plus and minus RNAs of a virusoid and a structural model for the active sites,” Cell, 49:211-220, 1987.

[0593] Fraley et al., Proc. Natl. Acad. Sci. USA, 76:3348-3352, 1979.

[0594] Friedmann, “Progress toward human gene therapy,” Science, 244:1275-1281, 1989.

[0595] Frohman, In: PCR Protocols: A Guide To Methods And Applications, Academic Press, N.Y., 1990.

[0596] Fujita et al., Cell, 49:357, 1987.

[0597] GB 2202,328

[0598] Gerlach et al., “Construction of a plant disease resistance gene from the satellite RNA of tobacco rinspot virus,” Nature (London), 328:802-805, 1987.

[0599] Ghosh and Bachhawat, In: Liver diseases, targeted diagnosis and therapy using specific receptors and ligands, (Wu G, Wu C ed.), New York: Marcel Dekker, pp. 87-104, 1991.

[0600] Ghosh-Choudhury et al., “Protein IX, aminor component of the human adenovirus capsid, is essential for the packaging of full-length genomes,” EMBO J., 6:1733-1739, 1987.

[0601] Gilles et al., Cell, 33:717, 1983.

[0602] Gioannini et al., J. Mol. Recogn., 2:44, 1989.

[0603] Gloss et al., EMBO J., 6:3735, 1987.

[0604] Godbout et al., Mol. Cell. Biol., 8:1169, 1988.

[0605] Gomez-Flores and Weber, “Differential effects of buprenorphine and morphine on immune and neuroendocrine functions following acute administration in the rat mesencephalon periaqueductal gray,” Immunopharm,m, 48:145-156, 2000.

[0606] Gomez-Foix et al., “Adenovirus-mediated transfer of the muscle glycogen phosphorylase gene into hepatocytes confers altered regulation of glycogen,” J. Biol. Chem., 267:25129-25134, 1992.

[0607] Goodbourn and Maniatis, Proc. Natl. Acad. Sci. USA, 85:1447, 1988.

[0608] Goodbourn et al., Cell, 45:601, 1986.

[0609] Gopal, Mol. Cell Biol., 5: 1188-1190, 1985.

[0610] Graham and Prevec, “Adenovirus-based expression vectors and recombinant vaccines,”Biotechnology, 20:363-390, 1992.

[0611] Graham and Prevec, “Manipulation of adenovirus vectors,” In. Gene Transfer and Expression Protocols, Murray, E. J., ed., Humana, New Jersey, vol. 7, 109-128, 1991.

[0612] Graham and Van Der Eb, Virology, 52:456-467, 1973.

[0613] Gramsch et al, J. Biol. Chem., 263:5853, 1988.

[0614] Gramsch et al., J. Biol. Chem., 263:5853, 1988.

[0615] Greene et al., Immunology Today, 10:272, 1989.

[0616] Grosschedl and Baltimore, Cell, 41:885, 1985.

[0617] Grunhaus and Horwitz, “Adenovirus as cloning vector,” Seminar in Virology, 3:237-252, 1992.

[0618] Guimbal, C., and Kilimann, M. W. (1993) J Biol Chem 268:8418-21.

[0619] Guyenet, P., Lefresne, P., Rossier, J., Beaujouan, J. C., and Glowinski, J. (1973) Mol Pharmacol 9:630-9.

[0620] Harlow, E. and Lane, D. (1988). Antibodies: A Laboratory Manual. Cold Spring Harbor, N.Y.: Cold Spring Harbor Laboratory Press, 471-510.

[0621] Haseloff and Gerlach, “Simple RNA enzymes with new and highly specific endoribonuclease activities,” Nature, 334:585-591, 1988.

[0622] Haslinger and Karin, Proc. Natl. Acad. Sci. USA., 82:8572, 1985.

[0623] Hauber and Cullen, J. Virology, 62:673, 1988.

[0624] Hediger, M. A., Coady, M. J., Ikeda, T. S., and Wright, E. M. (1987) Nature 330:379-81.

[0625] Hen et al., Nature, 321:249, 1986.

[0626] Hensel et al., Lymphokine Res., 8:347, 1989.

[0627] Hermonat and Muzyczka, “Use of adeno-associated virus as a mammalian DNA cloning vector; transduction of neomycin resistance into mammalian tissue culture cells,” Proc Nat'l. Acad. Sci. USA, 81:6466-6470, 1984.

[0628] Herr and Clarke, Cell, 45:461, 1986.

[0629] Hersdorffer et al., “Efficient gene transfer in live mice using a unique retroviral packaging line,” DNA Cell Biol., 9:713-723, 1990.

[0630] Herz and Gerard, “Adenovirus-mediated transfer of low density lipoprotein receptor gene acutely accelerates cholesterol clearance in normal mice,” Proc. Nat'l. Acad. Sci. USA 90:2812-2816, f993.

[0631] Hirochika et al., J. Virol., 61:2599, 1987.

[0632] Hirsch et al, Mol. Cell. Biol., 10:1959, 1990.

[0633] Holbrook et al., Virology, 157:211, 1987.

[0634] Horlick and Benfield, Mol. Cell. Biol., 9:2396, 1989.

[0635] Horwich et al. “Synthesis of hepadenovirus particles that contain replication-defective duck hepatitis B virus genomes in cultured HuH7 cells,” J. Virol., 64:642-650, 1990.

[0636] Hsia et al. J. Biol. Chem., 259:1086, 1984.

[0637] Huang et al., Cell, 27:245, 1981.

[0638] Hughes, J.; Smith, T. W.; Kosterlitz, H.; Fothrgill, L.; Morgan, B. and Morris, H. Identification of two related pentapeptides from the brain with potent opiate agonist activity. Nature 1975, 258: 577-579.

[0639] Hwang et al., Mol. Cell. Biol., 10:585, 1990.

[0640] Imagawa et al., Cell, 51:251, 1987.

[0641] Imbra and Karin, Nature, 323:555, 1986.

[0642] Imler et al, Mol. Cell. Biol., 7:2558, 1987.

[0643] Imperiale and Nevins, Mol. Cell. Biol., 4:875, 1984.

[0644] Jakobovits et al., Mol. Cell. Biol., 8:2555, 1988.

[0645] Jameel and Siddiqui, Mol. Cell. Biol., 6:710, 1986.

[0646] Jaynes et al., Mol. Cell. Biol., 8:62, 1988.

[0647] Ji, R. -R., Baba, H., et a. (1999) Nature Neuroscience 2, 1114-9.

[0648] Johnson et al., Mol. Cell. Biol., 9:3393, 1989.

[0649] Jones and Shenk, “Isolation of deletion and substitution mutants of adenovirus type 5,” Cell, 13:181-188, 1978.

[0650] Joyce, “RNA evolution and the origins of life,” Nature, 338:217-244, 1989.

[0651] Kadesch and Berg, Mol. Cell. Biol., 6:2593, 1986.

[0652] Kaeppler et al., Plant Cell Reports 9: 415-418, 1990.

[0653] Kaneda et al., Science, 243:375-378, 1989.

[0654] Kanner, B. I. and Schuldiner, S. CRC Crit, rev. Biochem. 22, 1-38. 1987.

[0655] Karin et a., Mol. Cell. Biol., 7:606, 1987.

[0656] Karlin, et al., 1986

[0657] Karlsson et al., EMBO J., 5:2377-2385, 1986.

[0658] Kasahara et al., Science, 266:1373-1376, 1994.

[0659] Kase et al., A potent inhibitor ofprotein kinase C from microbial origin,” J. Antibiot,

[0660] (8):1059-1065, 1986

[0661] Katinka et al., Cell, 20:393, 1980.

[0662] Katinka et al., Nature, 290:720, 1981.

[0663] Kato et al, J. Biol. Chem., 266:3361-3364, 1991.

[0664] Kato, A. C., Touzeau, G., Bertrand, D., and Bader, C. R. (1985) J Neurosci 5:2750-61.

[0665] Kawamoto et al., Mol. Cell. Biol., 8:267, 1988.

[0666] Kiledjian et al., Mol. Cell. Biol., 8:145, 1988.

[0667] Kim and Cech, “Three dimensional model of the active site of the self-splicing rRNA precursor of Tetrahymena,” Proc. Natl. Acad. Sci. USA, 84:8788-8792, 1987.

[0668] Klamut et al., Mol. Cell. Biol., 10:193, 1990.

[0669] Klein et al., Nature, 327:70-73, 1987.

[0670] Knipper, M., Boekhoff, I., and Breer, H. (1989) Federation of Experimental Biological Sciences 245:235-237.

[0671] Knipper, M., Kahle, C., and Breer, H. (1991) Biochimica et Biophysica Acta 1065:107-113.

[0672] Kobilka et al. J. Biol. Chem., 262:7321, 1987.

[0673] Koch et al., Mol. Cell. Biol., 9:303, 1989.

[0674] Kolesnikov, Pick, Ciszewska, Pasternak, “Blockade of tolerance to morphine but not kappa opioids by a nitric oxide synthase inhibitor,” Proc. Natl. Acad. Sci. U.S.A., 90:5162-5166, 1993.

[0675] Kotin, Siniscalco, Samulski, Zhu, Hunter, McLaughlin, Muzyczka, and Bems, “Site-specific integration by adeno-associated virus,” Proc Natl Acad. Sci. USA, 87:2211-2215, 1990.

[0676] Kriegler and Botchan, In: Eukaryotic Viral Vectors, Y. Gluzman, ed., Cold Spring Harbor: Cold Spring Harbor Laboratory, NY, 1982.

[0677] Kriegler and Botchan, Mol. Cell. Biol., 3:325, 1983.

[0678] Kriegler et al., Cell, 38:483, 1984a.

[0679] Kriegler et al., Cell, 53:45, 1988.

[0680] Kriegler et al., In: Cancer Cells 2/Oncogenes and Viral Genes, Van de Woude et al., eds, Cold Spring Harbor, Cold Spring Harbor Laboratory, 1984b.

[0681] Kriegler et al., In: Gene Expression, D. Hamer and M. Rosenberg, eds., New York: Alan R. Liss, 1983.

[0682] Kuhl et al., Cell, 50:1057, 1987.

[0683] Kunz et al, Nucl. Acids Res., 17:1121, 1989.

[0684] Kyte, J., and Doolittle, R. F. (1982) J Mol Biol 157:105-32.

[0685] LaFace, Hermonat, Wakeland, and Peck, “Gene transfer into hematopoietic progenitor cells mediated by an adeno-associated virus vector,” Viology, 162:483-486, 1988.

[0686] Lange, K. W., Javoy-Agid, F., Agid, Y., Jenner, P., and Marsden, C. D. (1992) J Neurol 239:103-4.

[0687] Larsen et al., Proc. Natl. Acad. Sci. USA., 83:8283, 1986.

[0688] Laspia et al., Cell, 59:283, 1989.

[0689] Latimer et al., Mol. Cell. Biol., 10:760, 1990.

[0690] Laughlin, Cardellichio, and Coon, “Latent infection of kb cells with adeno-associated virus type 2,” J. Virol, 60:515-524, 1986.

[0691] Le Gal La Salle et al., “An adenovirus vector for gene transfer into neurons and glia in the brain,” Science, 259:988-990, 1993.

[0692] Lebkowski, McNally, Okarma, and Lerch, “Adeno-associated virus: a vector system for efficient introduction and integration of DNA into a variety of mammalian cell types,” Mol. Cell. Biol., 8:3988-3996, 1988.

[0693] Lee et al., Nature, 294:228, 1981.

[0694] Lee, Tomasetto, Sager, Proc. Na'l. Acad. Sci. USA, 88:2825, 1991.

[0695] Levinson et al., Nature, 295:79, 1982.

[0696] Levrero et al., “Defective and nondefective adenovirus vectors for expressing foreign genes in vitro and in vivo,” Gene, 101: 195-202, 1991.

[0697] Levy, O., De la Vieja, A., Ginter, C. S., Riedel, C., Dai, G., and Carrasco, N. (1998) J Biol Chem 273:22657-63.

[0698] Lieber and Strauss, “Selection of efficient cleavage sites in target RNAs by using a ribozyme expression library.” Mol Cell. Biol., 15: 540-551, 1995.

[0699] Lin et al., Mol. Cell. Biol., 10:850, 1990.

[0700] Loh et al., Annu. Rev. Pharmacol. Toxicol., 30:123, 1990.

[0701] Lomasney et al., Proc. Natl. Acad. Sci. USA, 87:5094, 1990.

[0702] Luo, Zhou, Cooper, Munshi, Boswell, Broxmeyer, and Srivastava, “Adeno-associated virus 2 mediated transfer and functional expression of a gene encoding the human granulocyte-macrophage colony-stimulating factor,” Blood, 82 (Supp.):1,303A, 1994.

[0703] Luria et al., EMBO J., 6:3307, 1987.

[0704] Lusky and Botchan, Proc. Natl. Acad. Sci. USA., 83:3609, 1986.

[0705] Lusky et al., Mol. Cell. Biol., 3:1108, 1983.

[0706] Lutz et al., J. Receptor Res., 12:267, 1992.

[0707] Majors and Varmus, Proc. Natl. Acad. Sci. USA., 80:5866, 1983.

[0708] Mann et al, “Mammalian protein serine/threonine phosphatase 2C: cDNA cloning and comparative analysis of amino acid sequences,” Biochim. Biophys. Acta, 1130:100-104, 1992.

[0709] Markowitz et al., “A safe packaging line for gene transfer: Separating viral genes on two different plasmids,” J. Virol, 62:1120-1124, 1988.

[0710] Mayser, W., Schloss, P. Betz, H. “Primary structure and functional expression of a choline transporter expressed in the rat nervous system” FEBS, 305(1), 31-36, 1992.

[0711] Mayser, W., Schloss, P., and Betz, H. (1992) Febs Letters 305:31-6.

[0712] McCarthy M P, Earnest J P, Young E F, Choe S, Stroud R M. “The molecular neurobiology of the acetylcholine receptor” (1986) Annu Rev Neurosci. 9:383-413.

[0713] McCarty, Christensen, and Muzyczka, “Sequences Required for Coordinate Induction of Adeno-Associated Virus p19 and p40 Promoters by Rep Protein,” J. Virol, 65:2936-2945, 1991.

[0714] McLaughlin, Collis, Hermonat, and Muzyczka, “Adeno-Associated Virus General Transduction Vectors: Analysis of Proviral Structures,” J. Virol., 62:1963-1973, 1988.

[0715] McNeall et al., Gene, 76:81, 1989.

[0716] Mestek, Hurley, Bye, Campell, Chen, Tian, Liu, Schulman, Yu, “The human p opiod-receptor: modulation of function desensitization by calcium/calmodulin-dependent protein kinase and protein kinase,” C. Neuroscience, 15:2396-2406, 1995.

[0717] Mesulam, M. M., Mash, D., Hersh, L., Bothwell, M., and Geula, C. (1992) J Comp Neurol 323:252-68.

[0718] Michel and Westhof, “Modeling of the three-dimensional architecture of group I catalytic introns based on comparative sequence analysis,” J. Mol. Biol., 216:585-610, 1990.

[0719] Miksicek et al., Cell, 46:203, 1986.

[0720] Miller, Curr. Top. Microbiol. Immunol., 158:1, 1992.

[0721] Miyomoto and Takemore, “Inhibition of naloxone-precipitated withdrawal jumping by i.c.v. and i.t. administration of saline in morphine-dependent mice,” Life Sci., 52(13):1129-1134, 1993b.

[0722] Miyomoto and Takemore, “Relative involvement of supraspinal and spinal mu opioid receptors in morphine dependencein mice,” Life Sci., 52(12):1039-1044, 1993a.

[0723] Mizukawa, K., McGeer, P. L., Tago, H., Peng, J. H., McGeer, E. G., and Kimura, H. (1986) Brain Res 379:39-55.

[0724] Mordacq and Linzer, Genes and Dev., 3:760, 1989.

[0725] Moreau et al., Nucl. Acids Res., 9:6047, 1981.

[0726] Muesing et al., Cell, 48:691, 1987.

[0727] Murrin, L. C., DeHaven, R. N., and Kuhar, M. J. (1977) The Journal of Neurochemistry 29:681-687.

[0728] Muzyczka, “Use of Adeno-Associated Virus as a General Transduction Vector for Mammalian Cells,” Curr. Top. Microbiol. Immunol., 158:97-129, 1992.

[0729] Naciff, J. M., Misawa, H. and Dedman, J. R. (1997) Neuroreport 8, 3467-73.

[0730] Narita, Nartia, Mizoguchi, Tseng, “Inhibition of Protein Kinase C, but not of Protein Kinase A, blocks the development of acute antinociceptive tolerance to an intrathecally administered μ-opioid receptor agonist in the mouse,” European Pharmacology, 280:R1-R3, 1995.

[0731] Nathans et al., Science, 232:193, 1986a.

[0732] Nathans et al., Science, 232:203, 1986b.

[0733] Ng et al., Nuc. Acids Res., 17:601, 1989.

[0734] Nicolas and Rubinstein, “Retroviral vectors,” In: Vectors: A survey of molecular cloning vectors and their uses, Rodriguez and Denhardt (eds.), Stoneham: Butterworth,

[0735] 494-513, 1988.

[0736] Nicolau and Sene, Biochim. Biophys. Acta, 721:185-190, 1982.

[0737] Nicolau et al., Methods Enzymol., 149:157-176, 1987.

[0738] Nielsen, H., Engelbrecht, J., Brunak, S., and von Heijne, G. (1997) Protein Eng 10: 1-6.

[0739] Nikawa, J., Hosaka, K., Tsukagoshi, Y., Yamashita, S. “Primar structure of the yeast choline transport gene and regulation of its expression” J. Biolog. Chem. 265(26) 15996-16003, 1990.

[0740] Nothwang, H. G., Rensing, C., Kubler, M., Denich, D., Brandl, B., Stubanus, M., Haaf, T., Kurnit, D., and Hildebrandt, F. (1998) Genomics 47:383-92.

[0741] Ohi, Dixit, Tillery, and Plonk, “Construction and replication of an adeno-associated virus expression vector that contains human .lambda.-globin cDNA,” Gene, 89L:279-282, 1990.

[0742] Okuda, T, Haga, T., Kanai, Y., Endou, H., Ishihara, T., Katsura, I. “Identification and characterization of the high-affinity choline transporter” Nature Neuroscience 3(2) 2000.

[0743] Okuda, T., Haga, T., Kanai, Y., Endou, H., Ishihara, T., and Katsura, I. (2000) Nat Neurosci 3:120-5.

[0744] Olson et al., Peptides, 10: 1253, 1988.

[0745] Omirulleh et al., “Activity of a chimeric promoter with the doubled CaMV 35S enhancer element in protoplast-derived cells and transgenic plants in maize,” Plant Mol. Biol., 21:415-28, 1993.

[0746] Ondek et al., EMBO J., 6:1017, 1987.

[0747] O'Regan, S., Traiffort, E., Ruat, M., Cha, N., Compaore, D., and Meunier, F. M. (2000) Proc Natl Acad Sci USA 97:1835-40.

[0748] Ornitz et al., Mol. Cell. Biol, 7:3466, 1987.

[0749] Palmiter et al., Nature, 300:611, 1982.

[0750] Palukaitis et al., “Characterization of a viroid associated with avacado sunblotch disease,” Virology, 99:145-151, 1979.

[0751] Pascual, J., Gonzalez, A. M., and Pazos, A. (1990) J Neurochem 54:792-800.

[0752] Paskind et al., “Dependence of moloney murine leukemia virus production on cell growth,” Virology, 67:242-248, 1975.

[0753] PCT Application No. US87/00880

[0754] PCT Application No. US89/01025

[0755] Pech et al., Mol. Cell. Biol., 9:396, 1989.

[0756] Pei, Kieffer, Lefkowitz, Freedman, “Agonist-dependent phosphorylation of the mouse□ α-opiod receptor: Involvement of G protein-coupled receptor kinases but not protein kinase C, “Molecular Pharmacology, 48:173-177, 1995.

[0757] Perales et al., Proc. Natl. Acad. Sci. 91 :4086-4090, 1994.

[0758] Perez-Stable and Constantini, Mol. Cell. Biol., 10:1116, 1990.

[0759] Perriman et al., “Extended target-site specificity for a hammerhead ribozyme,” Gene, 113:157-163, 1992.

[0760] Pert and Snyder, “Opiate receptor; demonstration in nervous tissue,” Science, 179:1011-1014, 1973.

[0761] Pfeiffer, Brantl, Herz, Emrich, “Psychotomimesis mediated by kappa opiate receptors,” Science, 233:774-776, 1986.

[0762] Picard and Schaffner, Nature, 307:83, 1984.

[0763] Pick, Roques, Gacel, Pasternak, “Supraspinal mu₂ receptors mediate spinal/supraspinal morphine synergy,” Eur. J. Pharmacol., 220:275-277, 1992a.

[0764] Pinkert et al, Genes and Dev., 1:268, 1987.

[0765] Ponta et al., Proc. Natl. Acad. Sci. USA., 82:1020, 1985.

[0766] Portonet al, Mol. Cell. Biol., 10:1076, 1990.

[0767] Potrykus et al., Mol. Gen. Genet., 199:183-188, 1985.

[0768] Potter et al, Proc. Nat. Acad. Sci. USA, 81:7161-7165, 1984.

[0769] Prody et al., “Autolytic processing of dimeric plant virus satellite RNA.” Science, 231:1577-1580, 1986.

[0770] Puttfarcken et al., Mol. Pharmacol., 33 520, 1988.

[0771] Queen and Baltimore, Cell, 35:741, 1983.

[0772] Quinn et al., Mol. Cell. Biol., 9:4713, 1989.

[0773] Racher et al, Biotechnology Techniques, 9:169-174, 1995.

[0774] Radler et al., Science, 275:810-814, 1997.

[0775] Ragot et al., “Efficient adenovirus-mediated transfer of a human minidystrophin gene to skeletal muscle of mdx mice,” Nature, 361:647-650, 1993.

[0776] Redondo et al., Science, 247:1225, 1990.

[0777] Regan et al., Proc. Natl. Acad. Sci. USA, 85:6301, 1988.

[0778] Reinhold-Hurek and Shub, “Self-splicing introns in tRNA genes of widely divergent bacteria,” Nature, 357:173-176, 1992.

[0779] Reisman and Rotter, Mol. Cell. Biol., 9:3571, 1989.

[0780] Remington's Pharmaceutical Sciences, 18th Ed. Mack Printing Company, 1990.

[0781] Resendez Jr. et al., Mol. Cell. Biol., 8:4579, 1988. Ridgeway, “Mammalian expression vectors,” In: Vectors: A survey of molecular cloning vectors and their uses. Rodriguez and Denhardt, eds. Stoneham: Butterworth, pp. 467-492, 1988.

[0782] Ripe et al., Mol. Cell. Biol., 9:2224, 1989.

[0783] Rippe et al., Mol. Cell Biol., 10:689-695, 1990.

[0784] Rittling et al., Nucl. Acids Res., 17:1619, 1989.

[0785] Rodriguez-Puertas, R., Pazos, A., and Pascual, J. (1994) Brain Res 636:327-32.

[0786] Rosen et al., Cell, 41:813, 1988.

[0787] Rosenfeld, Siegfried, Yoshimura, Yoneyama, Fukayama, Stier, Paakko, Gilardi,

[0788] Stratford-Perricaudet, Perricaudet, Jallat, Pavirani, Lecocq, Crystal, “Adenovirus-mediated transfer of a recombinant alpha. 1-antitrypsin gene to the lung epithelium in vivo,” Science, 252:431-434,1991.

[0789] Rosenfeld, Yoshimura, Trapnell, Yoneyama, Rosenthal, Dalemans, Fukayama, Bargon, Stier, Stratford-Perricaudet, Perricaudet, Guggino, Pavirani, Lecocq, Crystal, “In vivo transfer of the human cystic fibrosis transmembrane conductance regulator gene to the airway epithelium,” Cell, 68:143-155,1992.

[0790] Rossi, Pasternak, Bodnar, “Synergistic brainstem interactons for morphine analgesia,” Brain Res., 624: 171-180, 1993.

[0791] Roux et al., “A versatile and potentially general approach to the targeting of specific cell types by retroviruses: Application to the infection of human cells by means of major histocompatibility complex class I and class II antigens by mouse ecotropic murine leukemia virus-derived viruses,” Proc. Natl. Acad. Sci. USA, 86:9079-9083, 1989.

[0792] Rylett, R. J. (1988) The Journal of Neurochemistry 51:1942-1945.

[0793] Rylett, R. J., Ball, M. J., and Colhoun, E. H. (1983) Brain Res 289:169-75.

[0794] Rylett, R. J., Walters, S. A., and Davis, W. (1996) Brain Research. Molecular Brain Research 35:354-8.

[0795] Sakai et al., Genes and Dev., 2:1144, 1988.

[0796] Saltarelli M D, Bauman A L, Moore K R, Bradley C C, Blakely R D. “Expression of the rat brain creatine transporter in situ and in transfected HeLa cells.” Dev Neurosci. 1996;18(5-6):524-34.

[0797] Sambrook, Fritsch, Maniatis, In: Molecular Cloning: A Laboratory Manual 2 rev.ed., Cold Spring Harbor: Cold Spring Harbor Laboratory Press, 1989.

[0798] Sarver et al., “Ribozymes as potential anti-HIV-1 therapeutic agents,” Science, 247:1222-1225, 1990.

[0799] Satake et al., J. Virology, 62:970, 1988.

[0800] Scanlon et al., “Ribozyme-mediated cleavages of c-fos mRNA reduce gene expression of DNA synthesis enzymes and metallothionein,” Proc Natl Acad Sci USA, 88:10591-10595, 1991.

[0801] Schaffner et al., J. Mol. Biol., 201:81, 1988.

[0802] Schloss, P., Mayser, W., and Betz, H. (1994) Biochem Biophys Res Commun 198:637-45.

[0803] Schnider and Levinson, Anesthesia for Obsterics, Williams & Wilkins, Baltimore, 566 pp, 1987.

[0804] Searle et al., Mol. Cell. Biol., 5:1480, 1985.

[0805] Sharma, Klee, Nirenberg, “Opiate-dependent modution of adenylate cyclase,”. Proc. Natl. Acad. Sci. U.S.A., 74:3365-3369, 1977.

[0806] Sharp and Marciniak, Cell, 59:229, 1989.

[0807] Sharp and Yaksh, “Pain killers of the immune system,” Nature Medicine, 3:831-832, 1997.

[0808] Shaul and Ben-Levy, EMBO J., 6:1913, 1987.

[0809] Shelling and Smith, Gene Therapy, 1:165-169, 1994.

[0810] Sherman et al., Mol. Cell. Biol., 9:50, 1989.

[0811] Simon, J. R., and Kuhar, M. G. (1975) Nature 255:162-3.

[0812] Simon, Medicinal Res. Rev., 11:357, 1991.

[0813] Sioud et al., “Preformed ribozyme destroys tumour necrosis factor mRNA in human cells,” J. Mol. Biol., 223:831-835, 1992.

[0814] Sleigh and Lockett, J. EMBO, 4:3831, 1985.

[0815] Spalholz et al., Cell, 42:183, 1985.

[0816] Spandau and Lee, J. Virology, 62:427, 1988.

[0817] Spandidos and Wilkie, EMBO J., 2:1193, 1983.

[0818] Stephens and Hentschel, Biochem. J., 248: 1, 1987.

[0819] Stewart, E. A., et al. (1997) Genome Res 7:422-33.

[0820] Stratford-Perricaudet and Perricaudet., In: Human Gene Transfer, Eds, Cohen-Haguenauer and Boiron, Editions John Libbey Eurotext, France, pp. 51-61, 1991a.

[0821] Stratford-Perricaudet et al., Hum. Gene. Ther. 1:241-256, 1991b.

[0822] Strotchman and Simon (1991).

[0823] Stuart et al., Nature, 317:828, 1985.

[0824] Sullivan and Peterlin, Mol. Cell. Biol., 7:3315, 1987.

[0825] Swartzendruber and Lehman, J. Cell. Physiology, 85:179, 1975.

[0826] Symons, “Avacado sunblotch viroid: primary sequence and proposed secondary structure.” Nucl. Acids Res., 9:6527-6537, 1981.

[0827] Symons, “Small catalytic RNAs.” Annu. Rev. Biochem., 61:641-671, 1992.

[0828] Takebe et al., Mol. Cell. Biol., 8:466, 1988.

[0829] Tamaru, M. and Roberts, E. (1988) Brain Research 473, 205-26.

[0830] Tandon, R. (1999) Br J Psychiatry Suppl 37:7-11.

[0831] Tavernier et al., Nature, 301:634, 1983.

[0832] Taylor and Kingston, Mol. Cell. Biol., 10:165, 1990a.

[0833] Taylor and Kingston, Mol. Cell. Biol., 10:176, 1990b.

[0834] Taylor et al., J. Biol. Chem., 264:15160, 1989.

[0835] Taylor, in Goodman and Gilman's The Pharmacological Basis of Therapeutics, 18th Ed.,

[0836] Gilman et al, eds., Pergamon Press, pp. 166-186 (1990).

[0837] Temin, “Retrovirus vectors for gene transfer: Efficient integration into and expression of exogenous DNA in vertebrate cell genome,” In: Gene Transfer, Kucherlapati (ed.), New York: Plenum Press, pp. 149-188, 1986.

[0838] Thiesen et al., J. Virology, 62:614, 1988.

[0839] Thompson et al., “Ribozymes in gene therapy.” Nature Medicine, 1:277-278, 1995.

[0840] Top et al., “Immunization with live types 7 and 4 adenovirus vaccines. II. Antibody response and protective effect against acute respiratory disease due to adenovirus type 7,” J. Infect. Dis., 124:155-160, 1971.

[0841] Tratschin, Miller, Smith, and Carter, “Adeno-associated virus vector for high-frequency integration, expression and rescue of genes in mammalian cells,” Mol. Cell. Biol., 5:3258-3260, 1985.

[0842] Tronche et al, Mol. Biol. Med., 7:173, 1990.

[0843] Tronche et al, Mol. Cell. Biol., 9:4759, 1989.

[0844] Trudel and Constantini, Genes and Dev., 6:954, 1987.

[0845] Turk, E., and Wright, E. M. (1997) J Membr Biol 159:1-20.

[0846] Tur-Kaspa et al., Mol. Cell Biol., 6:716-718, 1986.

[0847] Tyndall et al., Nuc. Acids. Res., 9:6231, 1981.

[0848] U.S. Pat. No. 4,682,195

[0849] U.S. Pat. No. 4,683,195

[0850] U.S. Pat. No. 4,683,202

[0851] U.S. Pat. No. 4,684,611

[0852] U.S. Pat. No. 4,797,368

[0853] U.S. Pat. No. 4,800,159

[0854] U.S. Pat. No. 4,883,750

[0855] U.S. Pat. No. 4,946,773

[0856] U.S. Pat. No. 4,952,500

[0857] U.S. Pat. No. 5,082,592

[0858] U.S. Pat. No. 5,139,941

[0859] U.S. Pat. No. 5,175,166

[0860] U.S. Pat. No. 5,279,721

[0861] U.S. Pat. No. 5,302,523

[0862] U.S. Pat. No. 5,322,783

[0863] U.S. Pat. No. 5,354,855

[0864] U.S. Pat. No. 5,384,253

[0865] U.S. Pat. No. 5,403,845

[0866] U.S. Pat. No. 5,464,765

[0867] U.S. Pat. No. 5,538,877

[0868] U.S. Pat. No. 5,538,880

[0869] U.S. Pat. No. 5,550,318

[0870] U.S. Pat. No. 5,563,055

[0871] U.S. Pat. No. 5,580,859

[0872] U.S. Pat. No. 5,589,466

[0873] U.S. Pat. No. 5,591,616

[0874] U.S. Pat. No. 5,610,042

[0875] U.S. Pat. No. 5,618,818

[0876] U.S. Pat. No. 5,656,610

[0877] U.S. Pat. No. 5,670,488

[0878] U.S. Pat. No. 5,672,344

[0879] U.S. Pat. No. 5,702,932

[0880] U.S. Pat. No. 5,726,179

[0881] U.S. Pat. No. 5,736,524

[0882] U.S. Pat. No. 5,780,448

[0883] U.S. Pat. No. 5,789,215

[0884] U.S. Pat. No. 5,945,100

[0885] U.S. Pat. No. 5,981,274

[0886] U.S. Pat. No. 5,994,136

[0887] U.S. Pat. No. 5,994,624

[0888] U.S. Pat. No. 6,013,516

[0889] U.S. Pat. No. 6,046,173

[0890] U.S. Pat. No. 6,096,767

[0891] U.S. Pat. No. 6,136,550

[0892] U.S. Pat. No. 6,177,451

[0893] Ueda, Miyamae, Hayashi, Watanabe, Fukushima, Sasaki, Iwamura, Misu, “Protein kinase C involvement in homologous desensitization of a-opioid receptor coupled to Gil-phosoholipase C activation in xenopus oocytes,” Journal of Neuroscience, 15:7485-7499, 1995.

[0894] Vannice and Levinson, J. Virology, 62:1305, 1988.

[0895] Vasseur et al., Proc. Natl Acad. Sci. USA., 77:1068, 1980.

[0896] Vogelsberg, V., Neff, N. H., and Hadjiconstantinou, M. (1997) J. Neurochem. 68:1062-1070.

[0897] von Heijne, G. (1992) J Mol Biol 225:487-94.

[0898] Wagner et al., Proc. Natl. Acad. Sci. 87(9):3410-3414, 1990.

[0899] Wagner et al., Science, 260:1510-1513, 1993.

[0900] Walsh, Nienhuis, Samulski, Brown, Miller, Young, and Liu, J. Clin. Invest, 94:1440-1448, 1994.

[0901] Wang and Calame, Cell, 47:241, 1986.

[0902] Wang, Johnson, Persico, Hawkins, Griffin, Uhl, “Human α opiate receptor: cDNA and genomic clones, pharmacologic characterization and chromosomal assignment,” FEBS Letters, 338: 217-222, 1994.

[0903] Wang, Y., Cao, Z., Newkirk, R. F., Ivy, M. T. and Townsel, J. G. (2001) Gene 268, 123-31.

[0904] Watt et al., Proc. Natl. Acad. Sci., 83(2): 3166-3170, 1986.

[0905] Weber et al., Cell, 36:983, 1984.

[0906] Weinberger et al., Mol. Cell. Biol., 8:988, 1984.

[0907] Whistler, J. and vonZastrow, M. (1998) Proc. Natl. Acad. Sci. 95, 9914-9.

[0908] Winoto and Baltimore, Cell, 59:649, 1989.

[0909] WO 88/10315

[0910] WO 89/06700

[0911] WO 90/07641

[0912] WO 94/09699

[0913] WO 95/06128

[0914] Wong et al., Gene, 10:87-94, 1980.

[0915] Wu and Wu, Adv. Drug Delivery Rev., 12:159-167, 1993.

[0916] Wu and Wu, Biochem., 27:887-892, 1988.

[0917] Wu and Wu, J. Biol. Chem., 262:4429-4432, 1987.

[0918] Xie et al., Proc. Natl. Acad. Sci. USA, 89:4124, 1992.

[0919] Yamada, K., Saltarelli, M. D., and Coyle, J. T. (1991) Brain Research 542:132-134.

[0920] Yamamura, H. I., and Snyder, S. H. (1972) Science 178:626-8.

[0921] Yang et al., Proc. Natl. Acad Sci USA, 87:9568-9572, 1990.

[0922] Yang, Chen, Trempe, “Characterization of cell lines that inducibly express the adeno-associated virus Rep proteins,” J. Virol, 68:4847-4856, 1994.

[0923] Yuan and Altman, “Selection of guide sequences that direct efficient cleavage of mRNA by human ribonuclease P,” Science, 263:1269-1273, 1994.

[0924] Yuan et al., “Targeted cleavage of mRNA by human RNase P,” Proc. Natl. Acad. Sci. USA, 89:8006-8010, 1992.

[0925] Yutzey et al., Mol. Cell. Biol., 9:1397, 1989.

[0926] Zheng C F. Guan K L. (1993) Cloning and characterization of two distinct human extracellular signal-regulated kinase activator kinases, MEK1 and MEK2. J. Biol. Chem. 268, 11435-11439.

[0927] Zhou et al, Plant Cell Reports, 12(11).612-616, 1993.

[0928] Zoli, M., Guidolin, D., Agnati, L F. (1992) “Morphometric evaluation of populations of neuronal profiles (cell bodies, dendrites and nerve terminals) in the central nervous system.” Microsc. Res. Tech., 21, 315-337.

[0929] Zoli, M; Lena, C., Picciotto, M. R., Changeux, J. -P. (1998) “Identification of four classes of brain nicotinic receptors using β2-mutant mice.” J. Neuroscie, 18, 4461-4472.

[0930] Zoli, M; Picciotto, M. R.; Ferrari, R. Coccbi, D, Changeux, J.P. “Increased neurodegeneration during ageing in mice lacking high-affinity nicotine receptors” EMBO Journal 18:5 1235-1244, 1999.

The application's sequence listing, which the Patent Office published only in electronic form, follows.

SEQUENCE LISTING (27 sequences)

SEQ ID NO: 1 - DNA, 1743 bp, Homo sapiens
  CDS (1)..(1743)
atggctttccatgtggaaggactgatagctatcatcgtgttctaccttctaattttgctggttggaatatgggctgcctggagaaccaaaaacagtggcagcgcagaagagcgcagcgaagccatcatagttggtggccgagatattggtttattggttggtggatttaccatgacagctacctgggtcggaggagggtatatcaatggcacagctgaagcagtttatgtaccaggttatggcctagcttgggctcaggcaccaattggatattctcttagtctgattttaggtggcctgttctttgcaaaacctatgcgttcaaaggggtatgtgaccatgttagacccgtttcagcaaatctatggaaaacgcatgggcggactcctgtttattcctgcactgatgggagaaatgttctgggctgcagcaattttctctgctttgggagccaccatcagcgtgatcatcgatgtggatatgcacatttctgtcatcatctctgcactcattgccactctgtacacactggtgggagggctctattctgtggcctacactgatgtcgttcagctcttttgcatttttgtagggctgtggatcagcgtcccctttgcattgtcacatcctgcagtcgcagacatcgggttcactgctgtgcatgccaaataccaaaagccgtggctgggaactgttgactcatctgaagtctactcttggcttgatagttttctgttgttgatgctgggtggaatcccatggcaagcatactttcagagggttctctcttcttcctcagccacctatgctcaagtgctgtccttcctggcagctttcgggtgcctggtgatggccatcccagccatactcattggggccattggagcatcaacagactggaaccagactgcatatgggcttccagatcccaagactacagaagaggcagacatgattttaccaattgttctgcagtatctctgccctgtgtatatttctttctttggtcttggtgcagtttctgctgctgttatgtcatcagcagattcttccatcttgtcagcaagttccatgtttgcacggaacatctaccagctttccttcagacaaaatgcttcggacaaagaaatcgtttgggttatgcgaatcacagtgtttgtgtttggagcatctgcaacagccatggccttgctgacgaaaactgtgtatgggctctggtacctcagttctgaccttgtttacatcgttatcttcccccagctgctttgtgtactctttgttaagggaaccaacacctatggggccgtggcaggttatgtttctggcctcttcctgagaataactggaggggagccatatctgtatcttcagcccttgatcttctaccctggctattaccctgatgataatggtatatataatcagaaatttccatttaaaacacttgccatggttacatcattcttaaccaacatttgcatctcctatctagccaagtatctatttgaaagtggaaccttgccacctaaattagatgtatttgatgctgttgttgcaagacacagtgaagaaaacatggataagacaattcttgtcaaaaatgaaaatattaaattagatgaacttgcacttgtgaagccacgacagagcatgaccctcagctcaactttcaccaataaagaggccttccttgatgttgattccagtccagaagggtctgggactgaagataatttacagtga

SEQ ID NO: 2 - protein, 580 aa, Homo sapiens
MAFHVEGLIAIIVFYLLILLVGIWAAWRTKNSGSAEERSEAIIVGGRDIGLLVGGFTMTATWVGGGYINGTAEAVYVPGYGLAWAQAPIGYSLSLILGGLFFAKPMRSKGYVTMLDPFQQIYGKRMGGLLFIPALMGEMFWAAAIFSALGATISVIIDVDMHISVIISALIATLYTLVGGLYSVAYTDVVQLFCIFVGLWISVPFALSHPAVADIGFTAVHAKYQKPWLGTVDSSEVYSWLDSFLLLMLGGIPWQAYFQRVLSSSSATYAQVLSFLAAFGCLVMAIPAILIGAIGASTDWNQTAYGLPDPKTTEEADMILPIVLQYLCPVYISFFGLGAVSAAVMSSADSSILSASSMFARNIYQLSFRQNASDKEIVWVMRITVFVFGASATAMALLTKTVYGLWYLSSDLVYIVIFPQLLCVLFVKGTNTYGAVAGYVSGLFLRITGGEPYLYLQPLIFYPGYYPDDNGIYNQKFPFKTLAMVTSFLTNICISYLAKYLFESGTLPPKLDVFDAVVARHSEENMDKTILVKNENIKLDELALVKPRQSMTLSSTFTNKEAFLDVDSSPEGSGTEDNLQ

SEQ ID NO: 3 - DNA, 1743 bp, Mus musculus
  CDS (1)..(1743)
atgcctttccatgtggaaggactggtagctattatcctcttctacctccttatatttctggttggaatatgggctgcatggaaaaccaaaaacagcggcaacccagaagagcgcagtgaagccatcatagtcgggggccgtgacattggtttgttggttggtggttttaccatgacagccacctgggttggaggaggctacatcaatgggacagcagaagcagtgtatgggccaggttgtggtctagcttgggctcatgcacccattggatattctctgagtctaattttaggtggtctgttttttgcgaaacctatgcgttccaagggatatgtgactatgttagacccattcaaacagatctatggaaagcgcatgggtgggctgctcttcatccctgcactgatgggagagatgttctgggctgcagcaattttctctgcattaggggccaccatcagcgtgatcattgatgtggatgtgaacatatcggtcattgtctctgcactcattgccattctttataccctagtgggtgggctctactctgtggcatatactgatgttgtccagctattctgcatttttataggactgtggatcagtgtcccttttgccctgtcacatcctgcagtcaccgacatcggattcacagctgtgcatgctaaataccagagtccctggctgggaaccattgaatcagttgaagtctacacctggcttgataattttctgttattgatgctgggtggaatcccatggcaagcctacttccagagggtcctctcttcatcctcagccacctatgctcaggtactgtccttcctggcagcttttgggtgcctggtgatggctctacccgccatatgcataggagctattggagcttccacagactggaaccagactgcctacgggtatccagatcccaagactaaggaggaagcagacatgattctcccgatcgttctgcagtacctctgccctgtgtacatctccttctttgggcttggtgctgtttcagctgctgtcatgtcctcagctgactcgtccatcctgtcggcgagttctatgtttgctcggaatatctaccagctttccttcagacaaaatgcatcagacaaggaaattgtgtgggtcatgaggatcactgtgcttgtgttcggagcatctgcaacagccatggctttgctgacgaagactgtgtatgggctctggtacctgagctctgaccttgtctacatcatcatcttcccacagctgctctgtgtactcttcatcaaaggaaccaacacttatggggcagttgctggttatatttttggactattcctgagaattactggaggagagccatatctatacttgcagcccttaatcttctaccctggttattactctgacaagaatggtatatacaatcagaggttcccatttaaaactctctccatggttacctcattctttaccaacatttgtgtttcttatctagccaagtatctatttgaaagtggaaccttgcctccaaaattagatgtatttgatgctgttgtcgcaaggcacagtgaagagaacatggacaagaccattctagtcagaaatgaaaatatcaaattaaatgaacttgcacctgtgaaacctcggcagagcctaaccctcagttcaactttcaccaataaggaggccctccttgatgttgattccagtccggaggggtctgggactgaagataatttacaatga

SEQ ID NO: 4 - protein, 580 aa, Mus musculus
MPFHVEGLVAIILFYLLIFLVGIWAAWKTKNSGNPEERSEAIIVGGRDIGLLVGGFTMTATWVGGGYINGTAEAVYGPGCGLAWAHAPIGYSLSLILGGLFFAKPMRSKGYVTMLDPFKQIYGKRMGGLLFIPALMGEMFWAAAIFSALGATISVIIDVDVNISVIVSALIAILYTLVGGLYSVAYTDVVQLFCIFIGLWISVPFALSHPAVTDIGFTAVHAKYQSPWLGTIESVEVYTWLDNFLLLMLGGIPWQAYFQRVLSSSSATYAQVLSFLAAFGCLVMALPAICIGAIGASTDWNQTAYGYPDPKTKEEADMILPIVLQYLCPVYISFFGLGAVSAAVMSSADSSILSASSMFARNIYQLSFRQNASDKEIVWVMRITVLVFGASATAMALLTKTVYGLWYLSSDLVYIIIFPQLLCVLFIKGTNTYGAVAGYIFGLFLRITGGEPYLYLQPLIFYPGYYSDKNGIYNQRFPFKTLSMVTSFFTNICVSYLAKYLFESGTLPPKLDVFDAVVARHSEENMDKTILVRNENIKLNELAPVKPRQSLTLSSTFTNKEALLDVDSSPEGSGTEDNLQ

SEQ ID NO: 5 - DNA, 4904 bp, Rattus norvegicus
  CDS (224)..(1966)
cttttttccaatacccgaattgattgatcgcctcgccccacggagacctcagcgagctccttgtcggcaccctccactcacctcgcgcctccctccctcgctgtcccacacagctccgtactgggggggacacccggacccctaaatcagctccgggtgacgccaagaagatttgatgaagtagccctctgtggaaggatcttcacggtaccctaaataaaaaatgcctttccatgtagaaggactagtagcgattatcctgttctaccttcttatatttctggttggaatatgggctgcatggaaaaccaaaaacagcggtaatgcagaagaacgcagcgaagccatcatagttgggggccgagacattggtttgttggttggtggttttaccatgacagccacctgggttggaggaggttacatcaacgggacagctgaagcagtttatgggccaggttgtggtctagcttgggctcaggcacccattggatattctctgagtctgattttaggtggcctgttttttgcaaaacctatgcgttccaagggatatgtgactatgttagacccgtttcaacagatctatggaaagcgcatgggtgggctgctgttcatccctgcactgatgggagagatgttctgggctgcagcaattttctctgcattaggggctaccatcagcgtaatcattgatgtggatgtgaacatatcggtcattgtctccgcactcattgccattctttataccctcgtgggagggctctactctgtggcatatactgatgttgtacagctattctgcatttttataggattgtggatcagtgtcccatttgccctgtcacatcctgcagtcaccgacattggattcactgctgtgcatgctaaataccagagtccctggctgggaaccattgaatcagttgaagtctacacctggcttgataattttctgttgttgatgctgggtggaataccatggcaagcctacttccagagggtcctctcttcatcgtcagcgacctatgctcaggtgctgtccttcctggcagcttttgggtgcctggtgatggctctaccagccatttgcattggggccattggagcctccacagactggaaccaaactgcatatgggtttccagatcccaagaccaaggaggaagcagacatgattctcccgattgttctacagtacctctgccctgtgtacatttccttctttgggcttggtgctgtttctgctgctgtcatgtcctcggctgactcatccatcctatcagcaagttccatgtttgctcggaatatctaccagctttccttcagacaaaatgcatcagacaaggaaattgtgtgggtcatgaggatcactgtgtttgtgtttggagcatctgcaacagccatggccttgctcacgaagactgtgtatgggctctggtacctgagctctgaccttgtctacatcatcatcttcccacagctgctctgtgtactcttcatcaaaggaaccaacacttatggggcagttgctggttatatttttggacttttcctgagaattaccggaggagagccatatctatacttgcagcccttaatcttctaccctggttattaccctgacaagaatggtatatacaatcagaggttcccatttaaaactctctccatggttacctcattctttaccaacatttgtgtttcctatctagccaagtatctatttgaaagtggaaccttgcctccaaaattagatatatttgatgctgttgtctcaaggcacagtgaagagaacatggacaagaccattctagtcagaaatgaaaacatcaaattaaatgaacttgcacctgtaaagcctcgacagagcctaaccctcagttcaactttcaccaataaagaggctctccttgatgttgattccagtccagagggatctgggactgaagataacttacaatgaccccatgtaaaatatacagaacagggcattgctgtagggtaatactgggaaaaaggtttggagcatatcttatacatgttacaatataaatgtttgaggaaaaaagtttttcagaaataagatattatggatgagttcagaaaaataacaattgcacagtgaggcagaagcaagcgtgaaggcaacagctttatttctcatcgtagcacttttcattttgaatagctttgttaagcacataaaaatgcataaagccccagccaaagaaagtggccaaatattatttatctttattatggaaggaaggaatatttattaaaaagtccattggaaggagattggatggtcccgatcattttcactggcgaatgcactggataacagattaattactacaacatggaggttatgcatgtattcacggtcactactgtgaaggatgcagtgggttagccagtacacttttccccatgggtaggttgtctggctctcccataatcttaactatggcatttacccatttttcaaggtgtgctttcttacccttttttgccatctagcatgtgtactctctccattcatccctccatctatctatccctccttctttctacactctctcctttcttctgctctttccctttcactccctttctcccttctctttatctctttatattttgtttctgtgaggggctggaactctattacagggccttgcacatgctaagtaagagctctcctactgagctacattgcaacctcacaataatttatttttttagtaatatcgtacattattctaagcacaagcaacacaacaatatcttatttaatagtgacatttttatgtgaaaatgatagaaaacagagtttatgttggagtaagatagaagcactgagccctttaagtgtgaccacagttgctatatgctcaaagagaagggtccaaaaccaagcatgaaatggttgttgggcagcattacagcaataagtcaagaagaaaaggaaaagaaggagaagaagaaaaacggatttctgtctccagcttttatacattaaatgttgttacacattataaatataatgtcttggcttatcttctaagagtattggaggcaaagttgagccatatataaagtgtggtttctgtctaacatctgttacaagtgccacctgcttcatcagcatgcattcgacgcatatatattaccagcagttcccaaataactctctgagaaactgggaaacaaaccctgcttacttttggacatccaataatgtaagagtttagtgctaaggatctactcttgacacttttccacataagccatttttagggactggacagatcaccacaagtgtgtatattgattttcaaatgtaatagaaaacaaaaagtaaaaacaagtcatagaagaagccatcatttttaatgtcttttgtgtacatggatttcaggaggtcaatcattaaatgtaattttgcttttctttgtagcattcagaattacatataaaacttgtgccaccaaaccctagaattctttttataagttacagttattatctcttaaagcatcacatttggaactcctttctttaaaaaggatgacttaaaaattcctactgtgacttttaaaatgtaaaattaaataattttacatattgtaatgtcctatttttcaggattgtctcaatccttaaaccactttactgatttgtgtatgtacgtaaggaagagaattcatttaccctccagtttatctcagaatcagctcactagctatggagtagttatggaaattatggagtctgagatgttcaaacatggtgtgagaaaagagtcaaaggaaaaaagaaaacacagataaaaaagtagtaaactttgtacttgaaaatctactagtgacaatgaaatttctggtaaacatggtatttcagatgcacaaagtcttccaacagagacaaaagagaaacttttgcccaactcatgatcttccatgaaattgttgaggtgtttgcttgcattaggaacatcacagaacctcactcacactagatctcacagcgaagcaggttcctttcacagacattacactttgtaatgctcttagtcaacaactgtccaactaagcttaaaatatttaaagtatcataatagcaaaaatgagagaagaatcccaagatatttatttatgcatactcttgaatggaattccccatgatttccaagaaagagatgatgcttcaaggtatattggattggagacatctctaaattattccagattcaagcagcagacctcattttcaaatccccaatgaaatcaaaataacccaaatgtttcagcctcttgcttgggaagtaatacatgtggatagcatttgagcaagataggagtttcactcctatatattaacaatgattgtgctatgtttcttaggtaatttgtgttcctctccatgtgttcagaacatcaagcttgtagctggaacgatatgttaacaagctgtcaaatgctcagtgccaaaatccaatttcattgttatacttacaagtaatgaattttatgtgcatattatatgaatgtaagcttgaaatgaatgcatttaatatttaatataatgtatattgaaaatgtcatttgtaaataatgaattagcattatattttaaacataaatcatcatttccctttttgtccttctacaaaatttgctctggtatcctatgtaacgtataataagtttgttataatgtatgttggctactgcatagacaaatgcatagaattgttccaaaacttatatttttatctgtcaaaatgttatacaaaattatacagaaataagtagatttacaagtacacatgtatgtgttcaaatgtaatgatactgtattaaattattccattgcaattcaaaaaaaaaaaaaaa

SEQ ID NO: 6 - protein, 580 aa, Rattus norvegicus
MPFHVEGLVAIILFYLLIFLVGIWAAWKTKNSGNAEERSEAIIVGGRDIGLLVGGFTMTATWVGGGYINGTAEAVYGPGCGLAWAQAPIGYSLSLILGGLFFAKPMRSKGYVTMLDPFQQIYGKRMGGLLFIPALMGEMFWAAAIFSALGATISVIIDVDVNISVIVSALIAILYTLVGGLYSVAYTDVVQLFCIFIGLWISVPFALSHPAVTDIGFTAVHAKYQSPWLGTIESVEVYTWLDNFLLLMLGGIPWQAYFQRVLSSSSATYAQVLSFLAAFGCLVMALPAICIGAIGASTDWNQTAYGFPDPKTKEEADMILPIVLQYLCPVYISFFGLGAVSAAVMSSADSSILSASSMFARNIYQLSFRQNASDKEIVWVMRITVFVFGASATAMALLTKTVYGLWYLSSDLVYIIIFPQLLCVLFIKGTNTYGAVAGYIFGLFLRITGGEPYLYLQPLIFYPGYYPDKNGIYNQRFPFKTLSMVTSFFTNICVSYLAKYLFESGTLPPKLDIFDAVVSRHSEENMDKTILVRNENIKLNELAPVKPRQSLTLSSTFTNKEALLDVDSSPEGSGTEDNLQ

SEQ ID NO: 7 - DNA, 1985 bp, Caenorhabditis elegans
  CDS (9)..(1739)
tgacaaatatggccgacttattgggtatcgtggccattgtgttcttctacgtgctcattcttgtcgttggaatatgggcgggtagaaaatcgaaaagttcaaaagagcttgaatcagaagccggcgcggcgacggaagaggtgatgttagctgggagaaacatcggaactcttgtcggaattttcacaatgactgccacgtgggttggcggtgcttatatcaatggaaccgccgaggctctgtataatggaggtctccttggatgtcaggctccagttggatatgcaatttcccttgttatgggaggactacttttcgcaaagaaaatgcgagaagaaggatatattacaatgctcgatccttttcagcacaaatatggccaacgaatcggtggcttgatgtatgttccagcacttcttggtgaaacattctggacagcagccattctttcggcacttggtgcaacactgtcggtaattcttggaatcgacatgaatgcatcagtgaccctgtcggcctgtattgccgtattctacacattcaccggtggatactatgcagtcgcgtacactgacgtcgttcaactattttgcattttcgtcggtttgtgggtttgcgtgccggcggctatggtgcatgatggtgcgaaggatatttccaggaatgcaggcgactggattggagagattggaggattcaaagaaacatctctctggattgattgcatgcttctccttgtctttggaggaattccatggcaagtgtacttccaaagagttctctcctcaaaaactgctcatggagcacagacgttgtcgtttgtggcgggcgtcggatgcattctcatggcgattccaccagcgttgatcggtgcaattgccaggaacacagactggagaatgactgattattccccatggaacaatggaactaaggtcgaatcgattccaccggataagagaaacatggtggtcccgttggtattccagtatcttacgccaagatgggtcgcctttattggactcggcgcagtgtcggctgctgtaatgtcatctgcagattcatctgtactatcagcagcatcaatgtttgctcacaacatctggaagctcacaattcgccctcacgcgtctgaaaaagaagtgataattgtgatgagaatagccatcatctgtgttggtatcatggcaaccatcatggcacttaccattcaatccatctatgggctttggtatctttgtgcagatttggtctacgtcatactcttccctcaactattatgtgttgtatatatgccacgtagcaatacgtatggctcattggctggctatgcagtcggtcttgtgctccgtttgattggaggcgagccacttgtatcgctgccagcgttcttccattatccaatgtatacggatggggtacagtatttcccattcaggacaactgctatgttatcttcaatggctactatctacattgtatcaatacaatcggagaagctgttcaaatcgggacgtttgtctccggagtgggacgtaatgggttgtgtagtgaatattccgatagatcatgtaccccttccgtcagatgtatcgtttgctgttagtagtgagaccttgaatatgaaggctccaaacggaacaccggctccagtacatccgaaccaacagccgtctgatgaaaatacattattacatccatattcggaccaaagttattattccacaaatagcaattaaaagagacgaacttgttccacgtgttcacttaatttcctcccaaatttttttttgtattttttttagttttcgttaacttttttctcactttctcaaatttcagatctctattaatagacccatccggtggatacactttagtttttatttattttcctaaaatttgaaagaaaaaaatttgatgaattttgacatgttcagaaattccaataaaaacgtgaccaattaattaaaaaaaaaaaaaaa

SEQ ID NO: 8 - protein, 576 aa, Caenorhabditis elegans
MADLLGIVAIVFFYVLILVVGIWAGRKSKSSKELESEAGAATEEVMLAGRNIGTLVGIFTMTATWVGGAYINGTAEALYNGGLLGCQAPVGYAISLVMGGLLFAKKMREEGYITMLDPFQHKYGQRIGGLMYVPALLGETFWTAAILSALGATLSVILGIDMNASVTLSACIAVFYTFTGGYYAVAYTDVVQLFCIFVGLWVCVPAAMVHDGAKDISRNAGDWIGEIGGFKETSLWIDCMLLLVFGGIPWQVYFQRVLSSKTAHGAQTLSFVAGVGCILMAIPPALIGAIARNTDWRMTDYSPWNNGTKVESIPPDKRNMVVPLVFQYLTPRWVAFIGLGAVSAAVMSSADSSVLSAASMFAHNIWKLTIRPHASEKEVIIVMRIAIICVGIMATIMALTIQSIYGLWYLCADLVYVILFPQLLCVVYMPRSNTYGSLAGYAVGLVLRLIGGEPLVSLPAFFHYPMYTDGVQYFPFRTTAMLSSMATIYIVSIQSEKLFKSGRLSPEWDVMGCVVNIPIDHVPLPSDVSFAVSSETLNMKAPNGTPAPVHPNQQPSDENTLLHPYSDQSYYSTNSN

SEQ ID NO: 9 - DNA, 1813 bp, Homo sapiens
  CDS (19)..(1761)
ctggatcattagataaaaatggctttccatgtggaaggactgatagctatcatcgtgttctaccttctaattttgctggttggaatatgggctgcctggagaaccaaaaacagtggcagcgcagaagagcgcagcgaagccatcatagttggtggccgagatattggtttattggttggtggatttaccatgacagctacctgggtcggaggagggtatatcaatggcacagctgaagcagtttatgtaccaggttatggcctagcttgggctcaggcaccaattggatattctcttagtctgattttaggtggcctgttctttgcaaaacctatgcgttcaaaggggtatgtgaccatgttagacccgtttcagcaaatctatggaaaacgcatgggcggactcctgtttattcctgcactgatgggagaaatgttctgggctgcagcaattttctctgctttgggagccaccatcagcgtgatcatcgatgtggatatgcacatttctgtcatcatctctgcactcattgccactctgtacacactggtgggagggctctattctgtggcctacactgatgtcgttcagctcttttgcatttttgtagggctgtggatcagcgtcccctttgcattgtcacatcctgcagtcgcagacatcgggttcactgctgtgcatgccaaataccaaaagccgtggctgggaactgttgactcatctgaagtctactcttggcttgatagttttctgttgttgatgctgggtggaatcccatggcaagcatactttcagagggttctctcttcttcctcagccacctatgctcaagtgctgtccttcctggcagctttcgggtgcctggtgatggccatcccagccatactcattggggccattggagcatcaacagactggaaccagactgcatatgggcttccagatcccaagactacagaagaggcagacatgattttaccaattgttctgcagtatctctgccctgtgtatatttctttctttggtcttggtgcagtttctgctgctgttatgtcatcagcagattcttccatcttgtcagcaagttccatgtttgcacggaacatctaccagctttccttcagacaaaatgcttcggacaaagaaatcgtttgggttatgcgaatcacagtgtttgtgtttggagcatctgcaacagccatggccttgctgacgaaaactgtgtatgggctctggtacctcagttctgaccttgtttacatcgttatcttcccccagctgctttgtgtactctttgttaagggaaccaacacctatggggccgtggcaggttatgtttctggcctcttcctgagaataactggaggggagccatatctgtatcttcagcccttgatcttctaccctggctattaccctgatgataatggtatatataatcagaaatttccatttaaaacacttgccatggttacatcattcttaaccaacatttgcatctcctatctagccaagtatctatttgaaagtggaaccttgccacctaaattagatgtatttgatgctgttgttgcaagacacagtgaagaaaacatggataagacaattcttgtcaaaaatgaaaatattaaattagatgaacttgcacttgtgaagccacgacagagcatgaccctcagctcaactttcaccaataaagaggccttccttgatgttgattccagtccagaagggtctgggactgaagataatttacagtgaccccatctaaataaaatactgcttttgcaaacagaacactgtaatagggtag

SEQ ID NO: 10 - protein, 580 aa, Homo sapiens; identical to SEQ ID NO: 2

SEQ ID NO: 11 - protein, 580 aa, Homo sapiens; identical to SEQ ID NO: 2

SEQ ID NO: 12 - protein, 580 aa, Homo sapiens; identical to SEQ ID NO: 2

SEQ ID NO: 13 - DNA, 175590 bp, Artificial Sequence
  Description of Artificial Sequence:  Synthetic Primer
  modified_base (1247)..(161183): N = A, C, G or T/U
catatagtgtctgatctcagactatagtggaattaaactagaaatcaataatagaaagatagctagaaaaccccaaaatgtttggagattaacaacacacttctcaataacacatgggtcaaagaagaaatttcaagaaaaattttaaaagattttgaagtaaaagaaaatgagaacacagcttgtcaaaatttgtgagatgcagcaaaagcagtgcttataagaaaatctatatcactgaatgcatgtacagtcatgtataacaatgacggggatacattgtgagaaatgcatctttaggtaattttgtgtgaatgttatagaatgtatcttcacaaacttatatggtctagcctactaaacacctaagctatatagttcagtctattgctcctatgctacaaacctacacagcatattgctgagctgaatactgtaggcaattgtaacacagtggttggtatttgtgtatctaagcatatctaaacatagaaaaggtacagtaaaaatatggtattataatcacagggaccatccttgtatacatagtccattgttgactaaaacactgttatgtagtccattactgttttagaaaaaaatgatctagaatcaatctaagcttctaccttaaaaaactagaaaatttaaagtaatcaaaagaaacaataaaaattagagctgaaatcaatgaaattgtaaaccgaaaatcagtagagaaaatcaagaaaccaaaagctggttctctaaaatgatcaataagagtaatacgcctatagttacgctgagaaaaaaaaagagaggattcaaatggctagtatcagaaattaaagaggggacatcatttcagacaccatggacattgtaaggataataaagaaatactatgaacaactccatgtctacatatttgataacataagtaaaatggggcagttctttgaaagaccaaatctgccaaaactcacacaagaagaagtaaacaatcttattaggattatatctattaaagaaattcagtcaataattaccttccaaaacaaagatcactaggccaagtgggttcactggtgaattctaacaaacatttaaggaaaaaaatcacagcaattctctacaatcccttttagaagatagaagcagagggagtactttctaattcatttaataaggccatcattttcctagtagtaccaaaaccagaaaaagacattccaaaaaacaaaaactacagacnnnnnnnnnnnnnnnnnnnnnnnnnnnnnnnnnnnnnnnnnnnnnnnnnnnnnnnnnnnnnnnnnnnnnnnnnnnnnnnnnnnnnnnnnnnnnnnnnnnncagactgtagaaatatagataagtaccagaatggcatgacagccatgaagcacagttaaggtaattgtttggcctatcagtagacatgtaacatacagatgaatagaaaccattcaagagacaagtaagtcatatagcaggataagataagcatattattccttagtactaagcttctgaaggcaaactgcatgtacatagcatgaatgtttctatcaatttcctttttgtatctatttgtcagttgttcggtattgtgggaattgtgggaaaatgaaggcattacaattatattacatatgaaaattaaattattatcaatgtgaaaagatcaacataggctttattaactattatttttgccatgtttaattctgaacctgtgctaaattcaacattgtatttagtcaaatggttataaatttgtagcaaaatttttaagcaataactttttattagtaagtgaccaaagtgcctagcatcttcatttttagaagtagtttagaagaaactgaattgtgtttgaaagaagcaagaatatatctggtgattgtctttcatattatctgatatttcaagtctataatcctacaatcgctttagatttcaaagtcaccctactttcctcttaaacaaaccaacaaaaaacaaccgaataaaaaactctttcttaatccacatgtatcattaccttctgtttcatcagtttttgtctgtttactcttgaaggtgctgtctacattcgcttctcacttaaattttcaattgcgtatagcctgtgttcttgccactatcaccccattgaaatggttcttgttatttcccagtcatatttacatggtgaaagtaaaagcacattttgtcaccatttcacaaaacagaaatataagggttaagcatttagaagttttaaccatactacagctgcatgtttactggttccatagtctgtgcctcaattatcatgtatgtaaaaggaggtgatagtatggtagtgagagttaaattatttacatgtagtgttattagcagtgtctggctcaacaagtttaatttaactatcagtatctccatttcctgagatataaaatggagaattacaatagttcattttatacgggaattaagccctgaggctgaatgttttaaccnnnnnnnnnnnnnnnnnnnnnnnnnnnnnnnnnnnnnnnnnnnnnnnnnnnnnnnnnnnnnnnnnnnnnnnnnnnnnnnnnnnnnnnnnnnnnnnnnnnntacatgtaaaatgagtaaggtttgatgtatccaaagtatgataaaagtacatactaatacacagcaataattggattacttgcatttatttttaatttttaatttttgtcagtaacatttttccaatggtgatatgataaacatagttcatgggccataccacaagatgatatcagaacaatatagataggatctaccatttcaccaggatgttttataacacagatgttttatagccttgtgtcataaatctctaaagcaagttcaaagaggcaaaggcagatggggggctagttagctatgtgaagaacttaacagaccttttcattgttgaaaaaaagagctatctagtcatggcctactaacatgtactctggattaatgagggagtaaaaatgacaaattctataagtaaaaacaaaacgaatgaaaaaaaagcaaatcttaaaaagttttcaaggcttccttgtttagtacaagtaaatgttctttagttttcaaacttcagaaaagttttcatgccattcagttacaaaggaagggagaaaaaaataacaatgaatatacacaaaatgattcaaactaaaaaaaatcagaaataaatttaaaagagaaaagtgctaaaccatacaaattcagaagaaaagtagaaagatgaaagaattccaatataggaataatgtaaaatgtcagaagaaatattagggcaaaaataatatggatataaatttaagaataaattaagtacaaatttaacttattcttttaaaacccttcaatttttaaaaccccttattttggaaaagcttgttaatgagctagaaataaagtgtctcaatttgggatacaaataaaatagtaaagctcaggaaatacacttttttctacctgaatatttcgtgcggaaactttagttttgaatatgtgtaataaaatgtggctgggcatgatggctcatgcctgtaatcccagcactttgggacgccgaggcaggtggatcatttgaggtcagaagttcaagaccagcctggcccacatggtgaaaccccttctctactaataatacaaaaattagatgggcgtggtagtgcatgcctgtaatcccagctgctcgggaggctgagtcaggagaatcacttaaacctgggaggtggaggttgcagtgagctgagattgcgcaatggcactccagcctgggcgacaagagtgnnnnnnnnnnnnnnnnnnnnnnnnnnnnnnnnnnnnnnnnnnnnnnnnnnnnnnnnnnnnnnnnnnnnnnnnnnnnnnnnnnnnnnnnnnnnnnnnnnnnttcataacaaaaaaaaatgccgctagagaagataacatgatagaaaaattagagtgcaaacataaaactagaagggacttttatcatccaactccagatatatgattaaatctgtttcttcctaactcaagcttttctgcacaatttttctttctaaatatgactaagtctatctttcttttcaatctttctcccttgtttttttaatatagaattcctaaatgaggcaaaatatcagtctactgagaataatacttttcagcttcgtattttatagttaattatgttatgactcatagaaaaattgatcccaaggttcatcatttttctttttctaatttctcctgttctgaagctgccgttccaccacttcctcgttaatgtaaaccaatagtggtccttgtttgaaagcacttcatcagaattagcctcaagtgagtcagctgatggaagaaatagtaataaatgaacatgtgtcaaagagagggctgttgagcaaaaaaaattcagttaccttccagcacagactacagaacaatttattaaagtgtcagaaacaaacctttaaggtaaaaaacagctgatacaaaattctctgattacctaaaatgaatctttaatgaagtaaatgaaaaagaacagtattccaactgtgctgtttatcattcaaaattaattggataatggttaatttgaaaatataataatctctactgaactgactgaatagtgaataaaatgaattttaaggtttatttacacatagtaagacttcaaaatagatgttaattaattatcatttgcaagtagtttttaaaatgttgctattgaaatcagcttgacaaaaacaaagtcatgaaaagcaaataacttatatttttatatttcaaattcactagtttttataactaaatttttttaaaaacagaactctgtttttactctatatcaaataaaaccctttatctacacttaaaattgtgtggattaaaaaatcagattgtcctctctgtgtgtagcttataaattgttaagaaatccccattaacatatcacagagaggttcaatttgtgtgaagctaaatattatttgtgtaattctatccaagatggataagccacttaagctttatttccaccaattagcaatgaactggtccagggaatacataatttagggattttatagggcagtatattaactaggttgaggctacccacataccacacactgatttgttgcagaaaaaaaaaaaaaaaggaagaatttttatgctgcaactaaatttttgacagggtaaatgaagaaagaggattcaaacaaatcattacaggctgtcttttgtttgtttgtttgctcatctgtctttcatttttcagcctggtttgatgctgtaggcaaaataacttcaatactatgtaaaaatttttaactcaataatccattaccaaagaaggaaaatattccctttgaggtcttttccagtctttaattgtggattgtatggataggcaagaataacaatgtcacaaaactgtttaattatgggaagaatttctatagcacaagtgtggcctacagtaattagagaagagaatatagatatgacatgcctatcaatctacttggatttgtgtatatttaatattattgctattaacaattgatacctcttattccctgtaaaaaaaactctacaaattacacaacattctttctgtcaaatattttagaaatattgatataatcattctaaaaaaatccatataacattcagctatttctagtatctatgcaacaaaannnnnnnnnnnnnnnnnnnnnnnnnnnnnnnnnnnnnnnnnnnnnnnnnnnnnnnnnnnnnnnnnnnnnnnnnnnnnnnnnnnnnnnnnnnnnnnnnnnntggtttaatatcctgatttttaaagtcttatatgacttacatttgattttttttttttgcctctctagccttgttagaattacatttaattttggtataataaattctgttatataacctccttttctattttatatattaatattttactattttattttcttgtaagcttaattctgtttgtttctcttttggctctgtgactgatcaagaacatactaaatgtataaagtctgagcttgttattttaaatttgtaatgtccaggttttgttataaataccttagtgtctttctttaaaaagtaaaagaacaagtaataagtaactcacatagtggggagagtaaaaccattttagctgaaatggtttagatctaggataattatttgggggaaaatacattttcgagattttttcatatttttgcttgaattacctttactttcagtgcaaacttctgaaatttgatgtaatgtactctttattcctgttgtaacaacctcatagatgtcaggtttttattttacagctgaagagaatagaggctgttggacattttttttttttttttttttttttttttagggggctgaccctaggacgtaagcagcaatactaaatgttgcaacttggggtcctatgtattgtaacctgttggaagtagagtaattagtagtactgggggaaatcttaaaaacatcaatataaataggcaaaatttcttttctgattatcaagatcaaaaaagggaagctaaggtctaggtgatgaggttctctatgtgaagtcagttaattttcaatgagcagatcagcgttcttatctcttctcacaataatgattagcagttctttgcaaaggaagtttcagtgagtgcttgaaaaatatgggtcactgaggtctgtcatgcgaaactaagtgttggcctggcatctctggaactcaaatgatggccaagcaggcttgacttcagtgaaacagggttttaatgattaaatggaaatggatgaagttggtgaacaaatatagtgacttcaaagcctttaacttggattactggagaatcaagtgaaatatttcaccactgtgttatcactaaagagaatcagttctgtgtgtggtattggttctctaaacattatgttctacactaaggacccgaactgtcattcccagttagatagtgtttgaatgggaagtaatgttgaattgtttattcttaaaatttttttttagttccttaattatggttatttagataatccatcaattatagaannnnnnnnnnnnnnnnnnnnnnnnnnnnnnnnnnnnnnnnnnnnnnnnnnnnnnnnnnnnnnnnnnnnnnnnnnnnnnnnnnnnnnnnnnnnnnnnnnnnagctggtattacaagtgtgtgccaccatgtccatctaatttttaaacattttttggtagacatagggtctcactttgttccctgggctgatctcaaactcctggcctcaagtgatactcccaccttggcctcccacagtgctgggattacaggtgtgggccataccacctgcccaaccagcaccatttattaacataatcatctattaccactcactgcacagcagtgtcatttttgtcataagttaggtgactagtatgtgtagatttgtttctatctttgtaccaattgcactcttaagttgtatttttacaggatctacatcaataaaattaattaattgggtctctctgttactgcatcacagtagaagatagctgcatgggattttatcagatttggagggtctggctatggaatgcctgatccatagtcatagaatcctagacaatacagcatctgatcagagaacccactgaaggtatgggagagaaggaggtatgagagtgagagccataaccaggagacccaatggtcatatcacatactgccccatccagacactaccagcctattagagtaatgaaatgatttgctggaaagaaacaactgaaacactaactcacaggcaacactctgaaaaaggcacagctgaaacactaactcataggcatccaataggatgaagtatacatactgaatcagacacctccatatgctgctgggtctccagtaggaaccaaggtatagaagcacaagtggccctacctaacatcattttcaatgacccactagggggcttttctttttgtccctttaactctgggctctgcaggattagaggtcccagttccaaaaggggacacacccttgccaagggacacagcaagatttccattaaactaccagcctcagctgccctctgggcactttggctctttatattcaggaccagcaggcaagaacaggagtcattgtcctgaaaggtgtcattggccctgaccagcagaaaaaggtgaggcttacacctctttcttatacaattgagaggaacatttacagaactcaggtgatctgcaggggcacttcctgttactcctttatccagatgtgactgtgaatggacaagtgcagccatcctgatctgagaaaagtgtgattatcaggggtccagacccctcaggaatgggagttagagtcagctcagtaggtaagccacggaggtggtagctgaggaagcagggaatttagaatggacattgggtggggaaggtggggatagtgaataccaattggagcccctaagctccctcttctcagtttccccttaggaagagaggctcactgggaccccaaagaagctgctctgcaagtgtatatggtgatacgaagccacacagcacaagggtggattgtggcaaccatggaggtttactgctcataacacccttgaaggaagaacttgctggcagcctcagctgttaatgaattcatgatctgccttcactttcaagccgaatctgcattcttccaaggtaacccccacccagtgactgagcacagtaaggacactagggcctggccatttctgtgggtttctttaatgagcaatctttgctctggagctccccgttgggttggctgagattttgtcagatcttcatcatggactgaggttcccacatctggaaccttcactataagaaaatcaggacatggaatttttggctttccagcctgtgtagtacaagaaagcatccaagaaggagggagaagggaggcggagcactaatctaccatgtacctcagccagttcaccgtgtcccatgaggaagaagggagcagtggtttctggaaagccacaggtgaaggcatttcctggcttgaaaacagaaatggaaccaggaaagaggagagagaaaagcatagcccagtggagcatgcaagcaggtccgatgtggacaagcttttctgtctttttggaatccctatcaaatgctgccctctgatgtttgtggaataaactacttttgagaaatgtgaaaacagcctcataagagaatgaatctagctgtagtttcctgggataaatagctctagatgtctgaacctcatggaaaccaggaaaaatccaccaaactgggcaccaaaactacttccaaatgattgggtcaactgccatacagatcaagttttaccgaggtgctattaacttagacctctaggtatagcttatcttttcttccacaatcagagtgggggcagtcttaagcattcctcatggttcatggaatgatcagaaagcacatggtaaattatgaatcatttgtacaaactatgaatccaaatgaagtcttccaataaaagcgtttaatttattgccagtattattcatatcacttctctttataatctgtctttacaaggtccccccaaccataccaccatcataaatgttgattaggaaaagagtgacatcactgattttcagaatgttaagtgccagtagggaataactttatgtcaacaaacaaagtttctgtttctgaatataatattgcccagtacagccaaggaatgaaagtcacaatgtttaaaagtatcacatctctagctgtcagttgatacacaaaacacttgtcagagttacagattaaacagtaaataaaagccaagaatcaggagatgacccttgggcatgccaagcatgctcctgcctcagtgcacttacgttttcctctgcttgcaacacactttccctcaatatcacatccacaggagtgttctctcatcttccttccaagctgctaaagtggtaaggtccagggtctatgttcacagaagtttaagtcacagtcacatctttctattccccctttatcccccatggtcattttgtggccaattggaactgtggcttgggatctttggatggaggaaggtgggttagaagaggcttcactgtagacaaatttatgtgagttgtctctattggggttggaagtcaaaagcacatttattgtgttagtttgtttccctttgctaaccttccttcagtatatgccttccttttctatttattctttggcaggatttaaatattcatgggtctctgggcctagtaatttcttttttttttcagacggagtttcgctcttgttgccgaggctggagtgcaacggcgcgatctccagctcaccgcaaactccgcctactgggttcaagcaattctcctgccttagcctcctgaacagctgggattacaggcatgtgccaccacacttggctaattttgtatttttagtagagacggggtttctccatgttggtcagggtggtctcgaactcccaacctcaggtgatccgcccgcctcggcctcccaaagtgctgggattacaggcgtgagccaccgggcccggcttaatttccgatagcccctcaatctcactctgattcctaatgggattcatgctagagaagccaagtagattaatgagcaaaggccatcatgtccggaattgcagcactcttttctgagaattgtctccatcccaagaccaccatctctgagaacctctaaatatttgcaaactctttggcaaacagtatcaaaccattcaagtttgaggctagagtagtaactaaaatatgacaagctggagatgctcagcaaaaactacttatattgtgcttgtacagatcaacctgcagtttccaggtgccagagctgttaccattcctacctttctcttcaatcttctagtactagggaaaggtatttgcaaataaggcaaggcagagatcagagcatgctgccctctgcatggcctgggggaagtgcatcacactctccctctccactgtttgctttctcactggggaagagatggactcatcttcaaaatgaagggataaaaggctgcagaaaacaacaagctcggggctaagtgtggggtcagagctgtgtgtaatcagtcattagggggccctgatctgctgatctactttaaggctttggaatttgacttgagggatgtcatcctgctgcgttcacagaagaaattcccaggggctagaggtgaggtctagccacaaaagtgagatcatagatggagaaacacttagaaaaagagtttgtagtgctgttgttgtggtaatgaaaagaataataagctgaccacaaagatcctcccaaatctctcatgttgagtagtttagtcattgtacaataaaatagcatagctttgagagctaaataaatgtgggatagagaaatgattacagtgttcacaaatgagagataaattaaacaaattacagcaatccctaccatagaataatatgtagtcatttaaaaattatgtactacacacatattgtggagggcaacgtggcacaatggataaaaaaatacagatccatatacctctaatctagcattccactttaagaaatttatcttacaggtgtgttcatacaggtgcaaaatgacatgtatacgattatttgccttgccttagaagaaaacctaggcaataccactcaggacataggcatgggcaaagacttcatgactaaaacaccaaaagcaatggcaacaaaagccaaaattgacaaatgggatctaattaaactaaagagcttctgcacagcaaaagaaactagcatcagagtgaacaggcagtctacggaataggagaaaattgttgcaatccactcacctgacaaagggctaatatccagaatctacaaagaacttaaacaaatttacaggaaaaaaaaaacaaccccatcaaaaagtgggcgaaggatatgagcagacacttctcaaaacaagacatttatgcgaccaacagacacaagaaaaaatgctcatcatcactgctgattagagaagtgcatatcaaaaccacaatgagataccatctcacaccagttaaaatggagatcattaaaaagtcaagaaacaacagatgctggagaggatgtggagaaataggaacacttttacactgttggtgggagtgtaaagtagttcaacaattgtggaagacagtgtggcaattcctcaaggatctagaaccagaaatacactttgacccagcaatcccattactgggtatatacccaaaggattataaatcattctactataggacacatgcagacgtatgtttgttgtgacactcttcacaatagcaaagacttggaaccaacccaaatgccgatcaatgatagactggattaagaaaatgtggcacatatactccatggaatactgtgcagccacaaaaaagaatgaggtcatgtcctttgcagggacaagggatgaagctagaaaccatcattctcagcaaactagtacaggaacagaaaaccaaacaccacatgttctcactcataaatgggagttgaacaatgagaacacatgggcacaaggaggggaacatcacaaactggggcctgtcggtggggtaggggtcaacggaagggagagcattagggcaaatacctaagcatgcggggcttaaaacctagatgacgggttgatgggtgcagcaaaccaccatggcacatgtatacctatataacaaacctgcacgttctgcacatatatcctagaacttaaagtataataaaaataaaaaattaaaaaaggaaaaaaattaaaaaaagattatttgttgcaccattatctataataccaaaagtttggaaacctgtttttaaaaagttatggttggccgggcgcggtggctcatgcctgtaatcccagcactttgggaggccgaggcgggcggatcacgaggtcaggagatcgagaccatcccggctaaaacggtgaggccccgtctttactaaaaatacaaaaaaattagccgggcatagtggcgggcgcctgtagtcccagctacttgggaggctgagtcaggagaatggcgtgaacccgggaggcggagcttgcagtgagccgagattgcaccactgcactccagcctgggtgacagagcgagactccgtctcaaaaaaaaaaaaaaaaaaaaaaaaaagttatggtatagtcatacaatggaatacaatgcagcctttaaaaagatacaagctccctatgtcccgatatgtaaaacaacaataacacccaccaaaaaacaaaaaaaaacaaaacaaaaccaaaaaaacccagtatatttttatattaccattggaggttaataatttaagaagaggacctagaaagaatatttgctgggtgaaaggtgagcagtttaatccagcttgccatcagcctctcatgccttcagcctgagtctactggataccaagctgtacctgaactgggcagcctcacctgaggaagaagcatatatatgtactctagtgcagtagattttaaattttagtgaacatgagaatcatctggaatggttgctgaaaatgaagatttaaggcatctgtctttagagattgtgactcagtaggtctggggttgggctctggaactggtgtttttttttttttaacaagcacaccaggtgattctgatgcagcagatccaatctctgagaaaccatgatataatgaccacggaacgagcacctgaggtgaactaacgcctcctcctcactgagtctgctccaggatctgtgagaggaaaatccagctgggtgatttggcttcaacatcaagctcaaagggccctgaaacgtggctactgccaaatttgcttatggaagcaagagccccttccacagatgcttatattttgcttcctttgagcatgaggctatcaatatcattttctaatccttataataaaaccacaacagaggtaatttctggtcacccagatttattcagatagaaagatgaatttatgagcacaaaacaatttgttgcccagtttatggcttaagggtgttttatctacttctacttaaataatgacacctttattctcagagagcaacttgacatagctatacccttaaatgatcattcatataatgtcatacaattctatgtattgtatataccatcgttcatgtgcatgtacacagtgtgtgagtattacaacttcattgtttggtcaattattttttcatatagtctttttcagcattagttgtcttttgctatttctatattctctgtgtttactttttatttttaaattatcattatttattattattaataggtgactaggtctctgtcacccaggttggagtgcatagtcgtgagcatagctcattgcagcctcaacctcccaggctcaagagatcctcccacttcaccctcctgagtagctgggactagaggcatgtgatgccacacccggctattttttttcctaatttttttgtaaagcctgtgtctcactatattgcccaggctggtctcaaactcctggcctcaagcagtcctcctgcctcggcctcccaaagtgctgggattacaggtgtgacccacgttgctcagtctacttttttatttttagatgttatttttgttatttttagattcagataaaatagaaatgcaaatacacatgcaacatttataattttttctatgtcgatatttatcatttttcatcagttctgtcatatttttcaaatctaccaatatttgtagttttgtttacaattgaaaaagttctgattactcactgaatttcctagatttatattctattcaggaaagtacactgtaacctttgtttcatactggataagcatttaggacagcaatttcacaaaattttgttctaagacacaggtttcctgatatttagtgcttactatgtgtagtattgttctacatgcttgataaatattagctaatttgatcttcaaaacaggaccataaggcagatactactattactatgccatgttgactgtcaatattgttttcaaacttggacttctgaccctaattgaaatccatcctgaattgaaatctctccatactcccctaaatcgaagagtaagaaatctcaaaatccaaatgctccatggctttcctagggctctcagaagagtttatgcaacatatcttactgttcaggttggtcccagaaactgcatattgtccagacggccctgctggaactggggccctttcttgacatcttgccatgcctttggcttggaaaccctctcttgggtgtttgtctaccctagccattgcctggcttagtgaggcagtactgttgctacaacttgtctctgagtattgcctgttgcctgcattctctctgaaacctgcacatttcacctccacctcatccctaattgggccattggattggaccatctagaaactgttatctacttgatctggcccagagttcagtagtccctttgaatgctgaccataaatccacaactggacagtttcttctaacccagttctgacttcctactgccattttgggtgctaaatccaaacccaacaaatctacttaagctatgacacttttgtgccagaggtgaacattcctttgatttggaagtgataagggcactgacaagctaggtttcagtgatgtgactgaaagcataaagatctcgtgctgtccaaggaaggaggcaaaatgtgacagaggccctgtggcaaaaggaaggttaacagactgcccttgacccctcctgctacagtttcttatgttgctccacatttggtctactctttcacttcatttgaagaaccatctatttagaagctataagcagtgttttcccccaggcaatggtactatatttccagctgggcaactcaacacatctgtacaatcatcctaaatttaattttcatcaaatttacttctcctcctgaggatggtgttctcattggaaggaagagcaagtgctcagccttacaaaaccccgcttcacatccaaggctctgtgttaacactggagttagttcatcaaatgacaattatgagtgctccggaatcctatagtgtttataacttgctggttttgtctcaaaaacattgaatcaggctctttgaagtcaaggttttttgtttttgttttagacagccctcatagaagtccctagaagggctgaaaatgtataacaagggatcttattgatccacatatatactaacatgaaaagccttcagtttcaagtctactttcattcattttttaattcaatgtttactgagtgctgagtatgtgccaggcaggattctaggtacgggagtacaacagagaacaaagcaaagatttctgccctcctggaatatacaattcctaatggcaatacataataaacataatgagcaaattatataatatttaaaagtgttaaggtctacagaataaagaaagagccaggcagaagagatgggagtgtggacatggagatacatgttgccgtgtcaaaagatgtttagagtggtcctctttgaaaagatcacatttgagaaaagacttaaaagaaaaataagggagagacacttatgggtctctggggaaagagaattacaggaagagagaaaagccagagtaaagactcagaagtgggtacatggtctggtgtgtgtgagaaatagcagaggtgaggaaggaagttaggggtagaatactagaaactaagatcaggctcgaggatagggagtgaaatctattagcagcgctaatagccttggttcaagaatgagtgacagacttttactgctttgagtaaagatttattcttctgtatattttcaatacaatttcactttctatttaatatttataaaaacatataaccttattgaaatgtaatttatgtacaataggccatattcattcaaactgtacaagtcgatgaattttgataaatgattacactgtgaactcaccactacactcaagttacagaacatctccatcatctctaagagtttcctcacaacgctttgtagtctgtcactccatctataccagtcccagggaactaacagtctgctttttgccactaatgattggtttgcattttctaatattttaacataaatggaatcctatagtacatactttttttatgtctggcttcttttagcacaacagttttgaaatttattcatgctaatgtatatataagtagttcctgactttttattgctgagcattccatcatataaatataccttatttagtttattctttcactggtagaaatttggtttttatacccaccaaattatattaatgttgcttttatcaagtgcattcaatagcaattacaatgagcacactatccagaaattttaaggacttagagcctaaggaaacaggaaatcttaaaagttaaatccaaatttatataggtattcttgctccagaagacttacatgatagggtgataaacaaaagatatccaagcatgaaaatatgttagtaggataaaattctatggaaagtgtggaatagaaaggtgggaaaattcccaatgataagaagtgtgttaactatggtatttagaacctattatacacatttcaaaagtgatatgacttttatcttaagtcagtatttacaatatgctagaaatttagtcctttatctctttaaacacaaaattgtatatgcctattttaaaatgtgaatttgaaaataaaaaaatagaagtaaaaacatttgaggaccccttttctcaggccccactctctggctctttaattgtctgaggtgggcaagaatattatgtttttttaaagttcctttggtgagggcaggcgcagtggttcatgcctgtaatcccagcactttgggaggccaaagtgggaggattgcttgagcccagaagttcgagaccggccagggcaacacagcaagaccccatctctacaaaaaatttaaaaaattagctaggcgtgatggcacgcacctgtggtcccacccagctacatgggaggctgaggtgggaggatcccttgagcccagtaagttgaggcttcagtgagccttcttcgtgccactgcactccagcctgagcaacagagcaagaccctgtctcaaaataaattaagaaataaacaaactcccccaggcgactctaatgtgctgcaaggttgtgaggagctggcctaaagacagtggtctctctcaattggacaatgtcggacaaggagtagaaaaaatgagagccacattgtttaccatttacctgggagtgttagtcatctggcaaggtttaactatttgcaaggtttataaaaataccaaatcaacaaggccttatagaacttaagcttcaaaaaatgttagagggcccagtaactatggtgccttccaatgatgaaacgttatttgcaaggcactgtaccaattattgtaagtaagtggaattatttcaactgtagacagttccaggcctagagcactaagccacttggagatatggtgacaaagaaaaattaattggcaattgtccctgggctcacctgttgaccttttccacagcaatatttttttctgtttactgtccaaaatctcaagtctgcaacttaattttgttttccacatccctatttctcctctattctctttttgtgccttacctgtttttttctcatctttgtttcttattatgatacaccctatagtgatgaaagatgaaaccaggatttgagctcaatgctgaattcnnnnnnnnnnnnnnnnnnnnnnnnnnnnnnnnnnnnnnnnnnnnnnnnnnnnnnnnnnnnnnnnnnnnnnnnnnnnnnnnnnnnnnnnnnnnnnnnnnnntgcatacatacatacatacatacataaaaataaattatgctgggctgggagcagtggctcatgcctgtaatcccagcactttgtgaggccaaggcaggtggatcacctgaggtcaggagttcaagaccagcctgaccaacatggcgaaaccgcgtctctactgaaaatacaaaaattagccgggcgtggtggtgggcacctgtaatcccagatacttgggaggctgaggcaggagaattgcttgaacctggcagaggttgcagtgagccaagatcgcaccattgcactccagagcctgggcaatagagtgagactctgtctcaaaaaaaaaaaaaaaaaaaaaaaggatgctgggcaactggatatccacatggaaaaaatgtatcttgatcttgagccttccttacactaaactaaaaaaataaatccagctggattgttgatctaaatgtgaatggtaagacaataaagctttaggagaaaacagaaaatttctgataccttggagtatgcaaagatttcttaaaaagacaacaaagtacttaccaaaaaggaatatacttatgaattggagtttaataaaattgagaacttatgtttatcaaacaaacaaaccacatggaatgtcaaaaggcaagccaggtctaggagaaaatatttgcaatggcacctgcttaacaaaggactcctacccatttatataaaattctcttattttcttacaaataagaaaaagagataacccaacaaaaagagcaacaagcaagatttaacaggtgctttaccaaagaggatatcattcatttaattcatttgtttctgtttattttcttttgtttatttactttttattttttattatactttaagttctatggtacatatgcacaacgtacaggtttgtcacatatgtatacatgtgccaagttggtgttactgtacctgttagctcgtcatttacattaggtacttttttttaaaattatactttaagttctaaggtacatgtgcacagcgtgcaggttagtcacatatgtatacatgtgccatattggtgtgctgcacccgttgactcgtcatttacattaggtatttctcctaatgctatccctccctgctccccccactccacgacaggccctggtgtatgatgttccccaccctgtgtccaagtgttctcattgttcaattcccacctatgagtgagaacatgtggtgtttggttttctcttcttgcgatagtttgctcagaatgatggtttccagcttcatccatgtccctacaaaggacataaactcatccttttttatggctgcatagtattccatggtgtatatgtgccacattttcttaatccagtctatcattgatggacatttgggttggttgcaagtctttgctgttgtgaacagtgccacaataaacatacatgtgcaagtgtctttatagcagcatgatttataatcctttgggtatatacccagtaatgggattgctgggtcaaatggtacttctagttctagatccttgaggaattgccacactgtcttccacaatggttgaactagtttatagtcccatcaacagtgtaaaagtgttcctatttctctgtgtcctctccagcacctgttgtttcctgactttttaatgattgtcattctaactggtgtgagatggtatctcattgtggttttgatttgcatttctctgatggccaatgatgatgagcattttttcatgtgtctgttggctgcataaatgtcttcttttgagaagtgtctgttcacatccttggcccactttttgatggggttgtttgatttttttcttgtaaatttgtttaagttctttgtagattctggatattagcccttcgtcagatgggtacattgtaaaaattttctcccattctgtaggttgcctgttcactctgatggttgtttctttggctgtgcagaagctctttagtttaattagatcccatttgtcaattttggcttttgttgccattgcttttggtggtttagtcatgaagtccttgcccatgcctatgtcctgaatggtattgcctaggttttcttctagggtttttatggttttaggtctaacatttaagtctttaatccatcttgaattaatttttgtacaaagtgtagggaagggatccagtttcagctttctacatatggctagccagttttcgcagcaccatttaataaatagggactcctttccccattgcttgtttgtgtcaggtttgtcaaagatcagatggttgtagacgtgtggtattatttccaatggctctattctgttccattggtctatatctctgttttggtaccagtaccatgctgttttggttactgtagccttgtagtatagtttgaagtcagataacgtgatgcctccagttttgttcttttggcttaggattgtcttggctatgcgagctcttttttggttccatatgaaatttaaagtggtttttttccaattctgtgaagaaagtcattggtagcttgatggggatggcattgaatctataaattaacttgggcagtatggccattttcacgatattgattcttcctacccatgagcatggaatattcttccatttgtttgtgtcctcttttatttcattgagcagtggtctgtagttctccttgaagaggtccttcacatcccttgtaagttgaattcctaggtattttattctctttgaagcaattgtgaatgggagttcactcatgatttggttgtctctttgtctgttattgttgtataggaatgcttgtgatttttgcacattgattttgtatccgagactttgctgaagttacttctcagcttaaggagattttgggctgagacaatggggttttctaaatatacaatcatgtcatctgcaaaaagggacaatttgacttcctgttttcctaattgaataccctctctttctcctgcctaattgccctggccagaacttccaacactgtgttgaataggagaggagggagagggcatccctgtcttgtgccagttttcaaagggaatgcttccagtttttgcccattcagtatgatattggccatgggtttgtcataaatagctcttattattttgagatacatctcatcaatacctagtttattgagagtttttagcatgaaggctgttgaattttgtcaaagggcttttctgtatctattgagataatcatgtggtttttgtctttggttctgtttatatgatgaattatgtttattgatttgcgtatgttgaaccagccttgcatccttgggatgaagccaacttgatcgtggtggataaggtttttgatgtgctgctggatttggtttgccagtactttatggaggatttttgcatcgatgttcatcagggatattggtctaaaattccctttttggttgtgctctgccaggctttggtatcaggatgatgctggcctcataaaatgaattagggaggattccctctttttctattgattggaatagtttcagaaggaatggtaccagctcctctttttacctctggtagaatttggctgtgaatctgcctggtcttggactttttttggttggtaggctattcattattgcctcaatttcagaacctgctattggtctattcagggattcaacttcttcctggtttagtcttgggagggtgtatgtgtcgaggaatttaccatttcttctagattttccagtttatttgcatagagttgtttatagtattctctgatgatagtttgtatttctgtgggatcagtggtgatatcccctttatcattttttattgcatctatttgattcttctctcttttcttctttattagtcttgctagtggtctctccattttgttgatcttttcagaaaaccagctcctggattcattgattttttgaagggttttttgtgtctctatctccatcagttctgctctgatcttagttatttcttgccttctactagcttttgaatgtgtttgctcttgtttctctagttcttttaattgtgatgttagggtgtccattttagatctttcctgctttctcttgtggtcatttagtgctataaatttccttctacacactgctttaaatgtgtcccagagattctggtatgttgtgtctttgttctcattggtttcaaagaacatctttatttctgccttcatttcgttatgtacccaatagtcattcaggagtaggttgttcagtttccatgtagttgagcagtttagagtgagtttcttaatcctgagttctagtttgattgcactgtggtctgacagacagtttgttataatttctgttcttttacatttgctgaggagtgctttacttccaaaaatatggtcaattttggaataagtgtaatgtggtgctgtgacaaatgtatattctgttgatttggggtggagagttctgtagatgtctattaggtctgcttggtgctttctgtctcattgatctgtctaatgttgacagtggggtgttaaagtctcccattattgtgtgggagtcttagtctctttgtaggtctctaaggacttgctttatgaatctgggtgctcctgtgttgggtgcatatatatttaggatagttagcttttcttgttgaattgatccctttaccattatgtaatggccttctttgtctcttttgatctttgctggtttaaagtatgttttatccgagactaggattgcaacccctgctttttttttgttttccatttgtttggtacatcttcctccatccctttattttgagcctatgtgtgtctctgcgtgtgagatgggtctcctgaatacagcacactgatgggtcttgactctttatccagtttgccagtctgtgtcttctaattggagaatttagcccatttacctttaaggttaatattattatgtgtgaatttgatcctgtcattatgatgttagctggttattttgcttgttagttgatgcagtttcttcctagcactgagggtctttacactttggcatgtttttgcagtggctggtaccagttgtccctttccatgtttagtgcttccttcaggagctcttgtaaggcaggcctggtggtgacaaaatctctcagtatttgtttgtctgtaaaggattttatttctccttcacttatgaagcttagtttggctggatatgaaattctgggttgaaaattctttaagattgttgaatattggtccccacttcttctggcttgtagagtttctgctgagagatctgctgttagtctgatgggcttccctttgtgggtaacccaatctttctctctggttgcccttaacattttttccttcatttcaaccttggtgaatctgacaattatgtgtcttggagttgctcttctcgaggagtatctttgtggcattctctgtatttcctgaatttcagtgttggcctgcctcactaagttggggaagttctcctggataatatcctgcagagtgttttccaacttggttccattctccctgtcactttcagatacgccaattagacatagatttggtcttttcacatagtcccatatttcttggcggctttgtttctttttactcttttttctctaaacttctcttcttgcttcatttcattcatttgatcttcaatcactgacaccctttcttccacttgatcaaattggctactgaagcttgtgcatgcatcatgtagttcttgtgccatggttttcagctccatcaggtcatttaaggacttctctacactgtttattctagttagccattcatctaatcttttttcaaggtttttatctcctttgtgatgggttcgaacatcctcctttagcttggagaagtttgttattacttattgtctgaagccttcttctctcaactcatcaaagtcattctccgtccatctttgttccattgctggcaaggagctgtgttcctttggaggagaagaggcgctctgatttttagaattttcagcttttctgctctggtttctccccatctttgtggttttatctacctttagtctttgatgatggtgttgtacagatggggttttggcgtggatgtcctttctgtttgttagttttccttctaacagtcaggaccctcagctgcaggtctgttggagtttgctggaggtccattccagaccctgtttttcctgggtatcaccagcggaggctgcagaacagcaaatattgcagaatggcagatgttgatgcctgatccttcttctggaagcttcatctcagaggggcatctggctgtatgagatgtcagtcagcccctactgggagatgtctcccagttaggctacttgagggtcagggacccacttgaggaggcagtctgtccattctcagatctcaaactctgtgctgggagaaccactactctcttcaaagctgtcagacagggacgtttaagtctgtagaagtttcttttgttcagctatgccctgcccccagaggtggagtctacagaagcaggcaggcctccttgagctgcagtgggctccacccagttcgagcttccaggcagctttgtttacctactcaatcctcagcaatggtggacacccctcccccagcctcgctactgccttgtagtttgatctcagactgctgtgctagcagttaatgaggctctgtaggcatgggaccctctaagccaggcacgggatataatctcctggtgtactatttgctaaggccattgaaaagcgcagtattagggtaggagtgtcccaattttccaggtaccatctgtcacggtttccctttgctaggaaagggaattccctgacctcttatgctttctgggtgagacaatgccccaccctgctccatgggctgcacccactctctgacaagcccagggagatgaacacggtacctcagttggaaatgcagaaatcacccgtcttctgtgtcgctgatgctgggagctgaagactagagctgttcctattcagccatcttggaacctcccttctgtttattttcaaatttgagtttagcttgttttctttttgtattgattttttaaataactaaaacattaacatatttgaaattcaaaatttatagtcacagcaaaaaaccttttttttttttgcaaaactaagcaaatatacatacatatttttattctcctactttctgacacaaaacatagcagcacattatatacactttttggtacactgctttttttcgtttaaggtgttgtggagattatgtcatattagtacatagatatcttcctcattctttcaaaaaccactttacattccattgtgtgcaaaactaagcaaatatacatacatatttttattatcctacttactgacacaaaacatggcagcacattatacatgctgtttggtacactgctttttttcatttaaggtatcatgaagattacatcatattagtacatagatatcttcctcattctttcaaaaaccacttcacattccattgtgtggttgtattgcagtttattcaccaagacccctattgatgcatatttggactgtttccaatattttgtgactgtgagtgaggccacagtgaacaccctgggatgtatgttgtttcatgttggtggggatatattgtctaaatactttcttagcagtggagttcctggatcgaagagtaaatgcaattgtttagatattgctaggttactcttcataggaaccaagcactattttgtactctctccagtagtgtacaaaagtgcctgtttctccacagctccactaacagagtttattctcaaacttagatttttgctagtctgataggtgaggaatggtaattgcattgtgattttatttgcttttctcttgttacaagaaagattaaccatctgttcatatgtttaagggtcatttaatatctttttctataaactgcctattcttatatttcgctcatttttctattagagttttttttttttcctctccttttaagaactctttatatgttagggaggtaagccctctgtactctaggttgccaatatttttctgctaattaagcatttgtattttcactttacttaggagattgttgtgatacaaatgtaattttttaaaaaatataacctcttttgggaggctgaggtaggagaatcaccggaggccaggagttcacaaccagcctgggcaacattgtgaggatttgtttttaccaaaaaaaaaaaaaatagtaataatagagaaagagaggaagagagaaagaaagaaagaaagaaagaaagaaagaaagaaagaaagaaagaaagaaaggaaggaaggtaggtgggagggagggaggaaagaaggaaggaaggaagcaggaaggaaggaaggaaggaaggaaaaaattagccaggtgtggtggtatgcacctgtagttcaaactactcaagagacaaagtgggaggattgcttgagtccaaaagtctgagactggagtgagccattattgcaccactgcactccagtctgggtgacagagaaaaactttgtctcaaaaaaaaattttttttaatgtaaaaaaatttctcaagtgtattagtctcttttcacattgctgataaggacatacccgagactgggacaaaaaagaggtttaattggacttacagttccacatggctggggaggcctcagaatcatgactggaggtgaaagacacttcttacatgatgggagcaagagaaaatgaggaagaagcaaaagtggaaacccctgataaacccatcagaccttgtgagacttattcactatcattagaatagcacgggaaagactggccccctgattcaattacctcctcccggatctctcgcacaacacatgggaattctgggaaataaaattcaagttgagatttgggtagggaaacagccaaaccatatcattctgcccctggcccctccaaatatcatgtcctcacatttcaaaaccaatcatgccttcccaacagtccccaaagtcttaactcatttcagcatcagcccaaagtccacagtccaaagtctcacctgagacaaggcaagtcacttctgcctatcagcctgtaaaatcaaaagcaatctaattacttcctagatacaatgggggtacaggtatttagtaaatacagccattccaaatgagagtaattggccaaaacaaagacgttacaggacccaggcaagtctgaaatccagcagggtagtcaaattttaaagctccaaaatgatctcctttgactccaggtctcacatacagatcatgctgatgcaagaggtaggttcccatggtcttgggcagctctgcctctatggctttacaggatacagcctccctcctggcagcttcccaggctggtgttgagtgtccatggcttttccaggtgcatggtgcaagaccattctggggtctggaggacagtggcccttttctcaagctccactaggcagtgccccagtagggactctatgtgggggctctgatcccacatttcctttccacactgccctagcagaggttctccttgagggccccacctctgcagcaaacttttacctgggcatccaggtgtttccataaatcttctgaaatctaggcaaaggttcccaaacttcagttcttgacttctgtgcacccataggctcaacaccacgtggaagctgccaaggcttggggcttccaccttctgaagccacagcctgagctgtacattggcccctttcagccatgggtggagtggctgggacacaaggcaccaagtccctaggctgcacacagcatggggaccctggaccttgcccacaaaaccactttttcctcctgggcctctgggcctgtgatgggagggtctgccgtgaaagtctctgacatggcctggagacattttccccatggtcttggggattaacactaggctccttgctccttatgcaaatttatacacctggcttgaatttctcaccagaaaatgggtttttttctctatcgcatagtcaggctgcaaattttctgaccttttttgctgaatgcctttaacagtacccaagtcacatcttgaatgctttgctgcttagaaatttcttctgccaggtaccctaaatcatctctctcaagttcaaagttccacaaatctcttggggaggggcaaaataccaccagtctctttgctaatacataacaagagtcacctttgctccagttcccaataagttcctcatgtccctctgagaccacctcagccttgaccttattgttcatatcattatcggcattttggttaaagccattcaacaagtctctagggagttccaaactttcccacatttacctgttttcttctgaggcctccaaactgatccaacctctgcctcttatccagttccaaagttgcttccacattttcaggtaacttttcagcagcacccgactctactggtatgaatttactgtatcagttcgttctctcactgctgataaagatgttcccgagactgggacaaaaaagatatttaattggacttacaattccacatggctggggaggcctcagaatcatgacaggaggcaaaaggcacttcttacatggcagtggcaagagaaaatgaggaagaagcaaaagtggaaacccctgataaacccatcagatctcgtgagacttattcactatcatgataatagcatgggaaaggcaggcctccatgattcaattacctccccctgggtccctcccacaacacgtaggaattctgggagatacaattcaagttgagatttgggtgggaacacagccaaaccatatcttcaagtttttattgtttccagattttgagtaatgaattgaaaggccttccctattcctaggttataaaagaatttacctatattttcttctagtacttgtatggtttctttttttggcatgtagttatatgaattggagtttatactgatacatggtatgaagtatggatccagttttatcttttcttcaaatggttatccatttgtcccaacgtcatgtatgaaaaagtcaatttttcccaccctcacattacaaacttagtgatttgagatgtcacctgtagtacatattaaatgtatatgtgtgtttgagcctatttaaattttttttctttgacatactgatttcatttctttggaatatatgcccagtagtgggattgctggatcatatgatagttttatttttaatttttttaaagaccatccatagtgttttctgtaatggctatattaatttatattctcaccaacaatgtacaagagttcccttttctctacattcttgccagtacttattatctttcgtctttctgatagcagctattctaacagttgtaaagtgatagctcattgtggtttaatttgcatttccctgactagtgacattgatcattttttttcttttttttattattatcctttaaattctagggtacatgtgcacaacatgcaggtttgttacgtatgtatacatgtgccatgttgatgtgctgcaccaattatctgtcatttacattaggtatatctcctaatgctatcccttccccctccccacaacaggccccggtgtgtgatgttccccaccctgtgtccaagtgttctcattgttcaattcccacctataagtgagaacatgtggtgtttggttttctgtccttgcaacagtttgttcagaatgatggtttccagcttcatccatgtccctacaaaggacatgaactcatcctttttcatggctccatagtattccatggtatatatgtgccacattttcttaatccagtctatcattgatggacatttgggttggttccaggtctttgctattgtgaataatgctgcaataaacatatgtgtgcatgtgtctttatagcagcatgatttataatcctttgggtatatgcccagtaatgggattgctgggtcaaatggtatttctagttctagatccttgaggaattgccacactgtcttccacaatggttgaactagtttacagtcccagcaacagtgtaaaagtgttcctattgctctgcatcctctccagcacctgttgtttcctgactttttaatgattgtcattctaactggtgtgagatggttatctcattgtggttttgatttgcgtttctctgatggccagtgttgatgagcattttttcatgtgtctgttggctgcataaatgtcttcttttgagaagtatatgttcatgtcctttgcccactttttgatggggttgtttgattttttcttgtaaatttaagttctttgtagattctggatataagccctttgtcagatgggtagattgtaaaaattttctcccattctgtagattgcctgttcactctgatggtggttctattctgttcagaaaattctgttctattggtctgtctgtccagtcgtgaactattattatgctaatttaattatagaagctttataatatgttttcatatctgatatggctatgctcccctccccaccattgctcttgtctttcttgcttcttggctgttcttgcctgtccttttttctatgtgactttatttttttaattgtataaatttatgggatataagtacaattttattacatgcatagtggtgatgtcagtgcttttaggatatccatcacccaaataacgtactttgtacccattaagtgatttccaattatccatccccttccactccttcactcttctgagtctccattgtctatcatttccctctctacttacatatacaccttttctggcactcatttataagtgagaacatgcaatatttatatttctgtgtctggcttgtttcatttatgacaatgccctcctgttccatccaagttcctgcaaaagacatgatttcatgtttttatggctgaatagtactttattctttatatataccacattttctttatccagtcacctgctgatggaaactaggttgcttccatatctttgctattgtgagtagttgataaacatacaagtgcaggtatctttttgatatattgatttctctttctttggccagatactcagtaatgagatggctggatcaaatggtagttccatttttagttctttgagaaatctccctactgttttctatagagattttactaatttacattcccgtcaacagtgtataagcattcccttttctccacaccctcccccaaatcttttatcttttgaataatagcttctgattggggtaagatgatatcttattgtggttttaatttgcatttctctgatgattagtgacgtcaagcattttttcatatacctgttggccatttgtatgtcttcttttgaaaaaatgtctatttatatcctttgcccactttttaatgacagtatttgtttttttttttcccattgagttttttgagttccttgtatattctggatattagttgcatgtaggatagtttccaaatatttctctcattctgcagattatttgttcactctgttgattctttcttttgctgttcagaagtgttttcatttagttatgtcccatttgcctgtttttattgcctgtgcttttgaggtcttagtcataaattcttgcctagacctatatctagaagaattttccctaggttttcttctagtatttttatagatttgggtcttttgtttaagtctttaatccatcttcagttgattttggtatatccatgcgactttagaataattttgtcttctttatgaaaaatcttattagcatttttgttggaatcacaataaataaataaataggttaacttcgggagaactaacatctttatgataatgaatttccttatccaagaatttattatgtgtcccaattattcaagtttaactttgtgtctttttgaaatgttttgaatttttcctcatataggttttgtatgtttcatgttccattttcttcctaggtattttatggttttttggttgttggttttttgttttgaaacagggtcttgctcagttgcctaggctggagtgcagtggcatgaacatgcctcactgcagccttgatctcttgggctcaaacaatccttctgcctcagacttctgggtagctgggactacaggtgtgtgccacacttggctaattttttttttttcatagagatagggtctttctttgttgtgcaggctggtcttgaactccaggccttaagtgatccttctgcctcgccttcccaaaatgctgatattacaggtgtgagctactgcatctggcctgtagttttttaaatgggatcttctctttcatgatatattctaactggcttacacttgtggataggaaagctattgattatttcattcaatattaaatttacttttttgttttactgaattcttttttattggttatatataatttttcatgaatgtatagtattgcattatataaaaatactgtaagttaattaaccaaactcttgatattgaacatttagttttatgtgtgtgggaggtgggtatgttttacattttcccactattaatacaaagatgtttacatcctagtggctaaatattttttgtttctttaataatttccttataatagattcctggaagtgaatttgctgcttcattggatgtcaaaactggaaagctttaagaaatatgttttgacaaattgccctggagagggcttgtacccatttattctctaacaagttatgtctgagaaggaacagagtttaattttactgggccaagcaaaacatcaagctcattaaaggcctagggcaataactttcagattatttagtcacagactttctgtttacaaggaagtttatgtattatattgaattatatgaaattgacatttttgcaggcaatatggttgaatatcagcagtttcctattgttcaacttaacagaagcctaacaggtatagcaaaaaaaaaaaaaaaacacagctgttttgactgatgatggagtaggggtattcagaagacctcagagaagggcttaagagcagctctctaggcacaaagccctgggtgggaaggcaggtgcgggatctgggaaccctcagggcttcagtcagggcgagtgtgtggacaagggtggtggacagtgtgagggccctgattgcctgtgggataggagctggcagagaggacaagaacatcaacatctggcaagggaacaggtgctttggacatttgcctttaacagcaagtctgaccttgcccttttgtgggattgcaatgtctgagaagcagtaccaagttcctacagtgtctctgtgatgtgtggaaagatgtgggttcaatcccagatcaagtatttattaacaatgtgacttagggcaagtttgtaagtttttctatgagttagtgttcttttctgtaaactgtgaataagaattcctaccatatcagtttgttgttaaaatacgatgctatggccgggcatggtggctcacgtctgtaatcccagcactttgggaggctgaggcagggtgatcacaaggtcaggaattccagagcagcctggccaatatggtgaaaccccgtctctactaaaaatgcaaaaattagcctggcgtggtcgtgggcgcctgtaattccagctacttgggaggctgaggcaggagaatctcttgaacccgggaagcagaagttgcagtgagcccgagatcgtgccactgcactccagcctgggcaacacagtgagactccatctcaaaaaaaaaaaaaaaaaaagatgatgctacaagctaccttagatacttaaagtattacatagtacacaatagattctcaaaaatgtcagttgtaataataatttcattatcttatattcattccttttgctctcatcaaggttcaaaaggacatccaaatgtgtgtttgtttagagtttatcttagggattccacctccctaatatgtctgtgaaccaaggaatagaataacagtaataattcctctcattttgtagaaaagaaactagagcagcttattgtttagctccatgaggaccattaagcactgggactcatttttattctcaaagactcccaggtgaaaaagacctggaaatcatctgttagttcaggttgagtctgatttctgattcacatctgcaacactcttggtgagacacgagcaagcctaaggatggatagcaaaacccacaatacccatgccatcacgcctctttcaaggtctcatgtaaatattattaatttttttaacttgtccaagttcacaaagctaactcttttttaatgatatttattttactgctgagccctgatgggcctcagaatccttttcaacaaattctggaagcagctaatactaaacaatttgatctgtcacattgagttgaaatctatgtgctgttctgacccagcctctagccgagagctagccaaaggctgggaatgcatttctacttgcaagagctagtttcatctctggaaaaacatgctgtctcatttcactttttaattcccccaaaatatatgcataaatgcttaataaagatttttataatgaatgaataaataaataactaaaggaaagatttacagaagtgtttcataacttgcctcagatctcctggaaaatgtgttggttcatcagacatttactgagaacctattatgttaagtaccatttatgtgaggtgatcaggaaagtctgcaatgatatgactttttaagttatggtgaaatatacgtaacataaaattgaccagtttaaccatttgaaaggtacagttcagtggcattaagtacaatctcactgttatgcaaccatcgtccacatccatctccagaacttattcacgatcataaactgaaactctcaactcattaaacccaaatcatccactattccatccccccatcccctggcaaccactgttctactttctgtatctatgaatttgactactctaagaacctcatacgtgaattcatgcaatatttatccttttgtttctggcttattttactcaggataatgtcttcaaaagttcatccatattgtagcacatacgagaagatgactttttaaaaagtttttaattaaaacataacataaaaagtgaaaagtgcataacttgctcacaacctgaacacatcagggtaagtagtgtctacataagaaatggaaagttactagaagggcagaagacctccccatactccactcctaacccccgagaataatctctatcctgacttctaacagcgtaattttgcctagtttttaactttacgtaaattaaagcatacagtattttttttctatttgctttttttgctcaatataatgtttgtggtattcatccatattgttgtgtgtagttatatttctttcattctcattgctatacagtatgttatcatgtaaatatgccacaatttatatatcattatattgttgatggagactcaggcagtttctggttttttgttaatatcaatagtcttgctatggctaggcatggtggctcacacttgtaatctcagcactttgggaggcggaggtgggtggttcacttgaggccaggagtttgagaccagcctgggcaatatagggagaccctgtatctacaaaaaattaaaaaattggccaggtgggccaggcatggtggctcacacctgtgatcccagcactttaggaggctgaggtgggcggatcacaaggtcaagagatcaagaccatcctggccaacatggtgaaaccctgtctctactgaaaatacaaaaattagctgggtgtggtggtgggcgcctatagtcccagctactagggaggctgaggcaggagaatctcttgaaccctggaggaggaggttgcactgagccaagattgcgccactgcactccagcctggcaacagagtgagactccatctcaaaaaaaaaaaaaaaattagccagttgtggtggtgcacagctgtagtcctaactacttgggagactgaagcaggaggattgcttgagcccaagagtttgagactgcagcaagctgtgattgtgccactgtgctccagcctgggcaacagaggaagactctgtctctataaataaataaataaataaataaatagtactgctatgaacattcctgtacatgccttttggtaaacatatgaatggatttctattatatatattatgtatatgctatatgaatatatcatataaatgtatatatgcatatatatatattcagaattaaaaatgctgggtcacagagtatgcctatattaagctttaatagcttttcaatgtggtttaccatttagaaagggtcatttaagctgtggcctgaaaaacgaaatggaatggaagctgcattgagatttccacactaacatctccctactgctatgacaaaaatgtgaccttttataaagtggttagagtcaaatgggagaagtcctttgcctcttttttgctgtggtctcccagtacactttagtgtgaggagcctctgtcattttggtcagacccagggagtcaagagatgatgactgatgactcagcctcctcagctcggcttcccagagctccactcaccacatcagtgagcctggcatgcagggggagacataaacacaaccatggtgttgatatcaatcctagcagagatgtcacaagccaaggtctgggaagaggaagaatgaatcaggataaaacttcagtggaaaaaagaccaagtgagagacttaaaagtcacgactaaagaattgtgtaagtaacagtggcaaatgacaacaaaaggcctctacagctaaaataatcagtggtacctgtttcagatccccaggcttctctgtttttgggaggtcttaggatgcagggctttgccaattgtgtggcctgggatgacagccaattgatggaagctggaattcagggctttcttctcaacagaagttaaagaaggcaaaaaaaaaaaaaaaaacccaaacaaaaaatctggccacaagtgatgtctatcagtgttgtgtgggtgtgagagcctgcccctttgtcttaatagagaatagaaacatacctgaggaggagccccaaaggcctgataggaatgggtcattttgagaaaaagtttccaatgggaaagataaaaatctagttgttttgcccttcaatgttttagagtttcctcagagcacagagaaatcttagtttgcttctccttaaggtactgctcataaagtcccgtcttttaaagaaaaggaacagagtgaaaaatgattgatgcatcaaagtgaagtttccttttccaaacatgtgtccgtaagttgctgatctggggtcccttcagaattgcatgctgtgtctttaacccatttcctgtttggaaaaaaatgtggctcactgccagcacagtgttcttggggcaaacgggaagtggctttaggtagccagacaggtatgcaacaaactacctttcataacaatgcctcaggccagaagggattgggtctcatgccaaaaatatcttttgattatctttctttagtacgtacaaaaattgagacttaaaaagtatttcagggccaccattttaaatttcagtcgaatgttcatgttactgattagagttgtgtctgtaaaaagtattaaagattgaagtgtgtttctattctgtaacagttgcatatgtgtgtattctaacagaatttcttgtatgaaataattgtctttcatttatttgtttctcttaagagttctcaaggaaaatacaagttaaattagttaagaaaattctgattggttgggtttcacctacctgcaatattgatttctctatatatatggataaaagaagtcaatttaaatatgttgacccatgtggtccagtttatatgacattcaaataaacacaactttgaacaccaagactaattggaaaataattcaaatatttaccagggactcttgaagaatgtcagaagaatatctagcagacatcctaacaattatttctgcatctttctttctatttcccatcactctgaagttttttttcaaagacttgctcaactcacaaaatctctttctcatccctgcattgcactcagggttctggtctttttcctccctctctcccaacaaaacacaaaaataaataaatttgtctctttataagattgaaaaaaaaaatcccagtctgtatcttatcttccagttatcagatctttctacccattggcctgattagcttcacagagtcctggagacaagctagcagtcacagagagggaagattgtgaacccttatacattcatgcttatggtcccagttgcacaataattttaaatacaattcatacaacaggctatttcccagtcactaaatgacaaaactttctttgcaataagaggcaaggccaacagtgaccaaaattcacatttttgaagactggagaaaggcatgagggaagaggtgaaatgtggtataaaatgaataacatctttgagcagaggcggcattctgccttagaccctcctcttcccctcctctcatgacatcacacgtgccgatgcttttccctagaagccctatttcttgaaatctgagaccataacccaacaaatcattcccttgaaagtttacttactttttgatggttatttgatatgaagaagaaatcgaaaagagagcagaacttcaaggttgaatttggccatttccatgctaattcatattggtgcctgagagtgtcctcattaggatctcatttctctgttaatgtcaaacagtatctgatctctgcctatccaagggctggtatgggcttaatgccagcatttaatgctggaatctaaagctgggacaggtaaggtgcttcgcctgcagcatccaaagatcagagcaggcagagaggaagtctaggagcatacacagtaaaaacgtataaataatatgatttgataagatacaagcacaataaaaagttagaaaagaaaaatactaaatacacgttaaatgtatacatgctgaagagattgccagataagagtgtttacatagcgtagtggaacaagtgaagaaatgtttccttagagaataatatattaagaaaatgtccatgtcacctgtattggttcagaaagagttatttttgaaagcacctggttgtcttaggattaaactgcctagcccttagggaaggagacaagggcctgttcattcattcattaactcataatatattaaaattgtgcttgctatatactaagcacagtattaggcactagaaatagggtatggactatgaccaacatgttgcttatcctcttggagcttacaatataacagggaagatagaccttggaaaggttattactcattcagacaatgaatgtgtgcaaagacagtgatgatggagaaatgcatggtgctattgaaggcattatggaagaatatgaccaaaaaagaggacagggtcgctttcttatcagtgaatatcagctgagcaattcaggtgccactgcttccacctctgggcatgggctttctcccttgcttggaaagaatacattaacatcagattaagcaaagagctcataaaatgcatgatggcacactgaccaatcaaaacataccaagcattcttttccagaggattgggaaagagattcattttgaaataattagctggcaataggttcaacatgaaaaaaataaacattaagccataattatttttcaacagaactggagacttattcatctactttctgaaattgtatatctatttcatagcactggaagctcaatactatgtttaatgttctgagggtaaaaacacgatgtctgttttatttcacaacatgaattgaaagcgtttgtgggacaggatgttgttttggttcaataggttgttcaagattccttaggagttttatccagtaactgctttcagctttaagaaattaatgtttccatttggttttcagatccaaaaactgcataagcagatttttctgtttttgatgccttatccaattgctagtgtggtttaaggtaatcaatcatataactgagagttaaagaactctggctaagagtttttacacaaataaaacttgcattggtttgattgtggatggtgcttgttcaaggactgtaggaataggttgtagtcaaacctcagaaatgttccagatttgcagcccatgcactggttgggaaggccataccttatggttcaggtaagatacaggcagggctcgtgctaggaaatgagaatacctgatgggaacaataaagttactgattctcttggctgcccagcaagtctctacctgtccctcatgaatctttctgccaaattccagaaggaaaaactctctttctctgggatatccagggaagatggaggttcctttccagccttcctttcatcacaaatttactagtcatatactgtggcaggcactaacagcacaaagacataagattataatcccaaagagctcactgtctaataaaggaaaattagcataaataaaatacttgcaatgcagtataagtacaatgctaggaacattcatgttatattttcaaccaggagacaatgcaattagcagtatcaggattcaggagagagaagtgtggcaaagaatactgcatagaagtgaacaacaaagtggggaagggaaggaaacccttccccagggtttgtatttaggaatacaatgaaattagtcaaggtggtcacagcctatcttctttcaggacccttttccccttcataggtctatcatgcctatcttccagtgctcaatactttcctgttgccctctagaggcccagagttcaccactctggagtcctatctaccttgatctgcccttactcggaccagtattgtcacctgttctgatctttctccaaaattttatgctgactcactgtattagtttccttttgttgtggtaacaattaccattaatgtagggcttaaaacagcacaatttttttatctcattgttttgaaggtcagaagtctgaaattatatcattgggataaaaaccacggtgtcggcacagctgcattcctttctggaaactcaaggggaatctattttcttgtcttttctagctcctagaggctgcccacattctttggcttgtggccccctcccatcttcaaagccagcgatagccagtcaagtccttctcacattgtgtccccctagctttgcttttgccatcacattttaccctgactcttacactcccacttcctctttcaccaagcaccctgtgatgacattgggcccagctggataatcccggatactctctctctctctcttttacagtcagctcattaataacctcaattccatctgcaaccttaattctcacagtttctggggattagaatgtggtcatctctgggggtgactgttattctgcctactgcacccaccttcaattctactatcaatcaaaatttacttgtatgttcttcaatgactcctcattagctaaaaagtgaacctaataattgaacccaaacagaaggtgttaaacggaaatatgtaggacctgtccctacttattctcctgtccctgtttacatatcatgagtcaagcatggttctcttctatctgaacccaaatgagccttcagaatcctttttcacatcctggcaaccacttccttatgactctctgtgatctctacaccttgcccaccccactctcctccttgagcaactaccgatctttttgtcactatagattagtttggaattcccagagtttaatgttagttgaatcacacagtgtgtactctcacccaaacttctttcattcagtataagtagttcatgattcacccatgtgtcattcaatagttcattcattttggatcagtattgtgaatcaatattccattgtatggatataccacaatttgtttatatattcaccttttgatgaacatttgagttgttttacattttggctattaaatataaagctgctataaaaattcaggaataagtctttgaaaggacataaatttccatttctcttgagtaaatacctaggaattaaatagctggatatatgatatgtatatgtttaacttcttaagaaactgtcaaaatattttgcaaagtggttgtaccattttacattctacctaccagtgaatacaaattccagtttttctacatcctcaccaatacttgataaggtcagtctttttaattttaactattctgatgggtatgtatacagtgatacctcattgtggttttaatatgcatttctctaatggttaatgctgttgagcttttcatgtgccatttgtatatcttctctggtgaagtgtcggattaaatcttttgcctaatttttaattggaatgttttttctcttattgttgagttttgacagttctttatatgttccagatacaagttcgttattagatataggctttgcaaaggttttctcctagtctgtggcttgccttttaatttttgttctttcatttcattttcattctttcatttataaaacagtgttattcaaagagcaaaatgttttcattttgatgaagtccaatttaccagtgtgttcttttatgaacttttttggtgtcatacctaagaaatctttgccttaccaagatcatcatcataagtatttcatatcttcattaatcttataaatgttaacacttctaaatttcaacttctgacactttgttgctagtatatagacgccatgctattaaattcctctccatcatgtccagaggcacacaatgcctggctatcccactcttagtgatgttaaattaaccaatgagtttagatagtgtcaacatgatctattcattaaaaaggttctccatcaacctttcacttaatatttttggacgattcaaattgcctacataaattatttcattagaggttccaagctgttgattttttgattccgttattcttcttgcatttactagctgtgattcatttatgaagaaattttcctggtcccctattttattagcctaaaatatagaatgtggaaaaagaagtataaataattgattctcttttttactttattatttttataatacatatttaatactctagaaacgactaaaagtcgtcaataatgttttatttttggaatatcttaatgaacacatgcatttatatttagttgatgtatttcagttcattggagcccttattttttggatgcttgaattgtccatctttggccagtatgagctctttcttattggtcttttttcagtatgactctagtagccattcataactttcttgctttcaggaaagacaagatgtcccagattcatcctgtacatttcctattctggatatcaaatggctatttctataaggtgctctggctcccgtcctggagaaatgatatgaagtgatcacaatctacatgctagggacactaatgactcctgcactctgattgtttcttttagtggggtgtatgttcataatcagaacttagttttaattctgtcagtttagcaatgtttttattaatgattaatccttttttgtgccttgttttaggatatttccttacttggaagttacaaaaatattctcccatatgatgctctgaaagggttgaatattttgcctttcctatttagggctgtgaactaactggaattgattttgttatatggttagggttccagtatcattttccctcaaaataatgctcaacttttctataattatttattgaaaggttcacctatttctgacttctctgcagtactatccctgtagtaaatcaaatatctttatgtgtgtaggttggtttctggagtatacatattttattctattggtctatttgcctatccttgtatgagtacctcattcttttaagttctatagcctttaataagccttagtatgcagtagagccaatcttccaattataattgtgtcttggctatgcttggctctttgtatttttatatatgttagaattggcttgtcaatatccctcccaaaaatcctaagattttaattgaactacattgacactagattaatttgtggggaattgcaatatttataatattgagtcttccaatcaatgtacagtaaatttctatatttgtttaggtctcctttaattttccttgttataattttatagttcttgccatacaactcttgtattacaactcttgcaatacaacacttaaattacagttaattctagttatgtaatatgtttgatattacaataaatggcataattttttcaattttgttttctaaatgttgcttatatatagaaataaattataaattgatttatttagtagacttctaaactgaattaataatttatctgaattattttgtactttttataaacataatcatatcacctgcaaatgatgctatttatattttgcatttaatttttatatatctttttttttaccttgttttactgttttgtctaggttccctaaggcaatgttgactagaagtgggatagtaacaccttttttttgttccttatatcatagagaaaactttatgtctcctcattaagaactgtttgcttgtgaagtttaaatttttatttttattaatttttagacaaaaatgatcctctcaattcctactttgctaagcttttcctttttaatcacaaaagaattcaaattttatctaatggctttttttctgcatctattgaattgattatatgatttttctttaacctcttaatatggtaaattacattgattaattttaagtattaaatcaaccttgacttgctggcatagaccctaatgattaaattacatacctggcaggaaacagtggctcatgcctctaattccagcactttgggaggccgaggcgggtggatcacttgaggtcaggggttcgagaccagcctggccaacatggtgaaaccatgtctctaataaaaatacaaaaattagccaggtgtggtggtgggtgcctgtaatcccagctactcagggaggctgaggcgggagaatcgcttgaaccgtaaggcagaggttgcagcgagccgagatcatgcaattgcactccagcctgggtgacacagtgagactgtctcaaaaaaaaaaaaaaattacattaccattttgctatgttggttgattcaggttgtcgctttagtgggattttaagagtgagtgaaagtaggttcacgttttcaatctgccatctttacttccatgttagtactaaataatttttttgccagctgatttactatattggcaccttcactccattctagtattccttgccacctttctctctcctaaatcctggtactgctaattgcattgtcttttggttgaaaatgtaacatgaatattccaagcactgtacttatactacattgcaagtattttatttatgctaattttcctttattagacagtgagctccttgggattataatcttatgtctttgtgctgttagatgcctgccacagtacatgaccagtaaatttctaatgaaaggaaggctggaaaggaacctccattttcccgggatatatattaaaaatcccttattgcaacatcactatttggcagctgctaagaatgacagctgccgaatggtgtagaagaatgtgtcgaaaggccccatggggtgtgataaattacactagtataaatcattctttttaaacttttaaagcatttttataattatcctatttgaccctcacaactgagaaatatgtaaattagtagctttatccctgttttacacataagtaaacaaggcccagagaaactaaatatttacctaagactatatgctagtttggggccaaatttggtctagaattcaggtttccagatgtttaaacccagggtctttttaatagaccagtggttctcaaactaaggattacttagggactgctattgaacagggatgggagagaagatagagggtgaaagatcaggaatctgggccccctactcatgttacaattctgcttttgtctcttctacgtgtaagtgttccatagaatttatcacttggaaaatagctctcttgctgataacaacacgcagccactagtctttaagcacatacttgctttctggcaccatgtgatgtttcgggcttactttgtacattccgtgtcctggaattggtttcagccatttctccaaggagttctggtttctttaggtggaaatgagatttagaatccagtatctgggctctaggtgggctcgtcgctactggtgcctcattgcttctagctctttacaggagacagtgataggaaactgcttttctaaaataaaaaatataaaaaaaagaaaaaaagataaaagaaaagcctgagtttctagtaatacttataattcacatgcattaccacatgattatttctttccttctcccattccatttttgtatttccttcttccatagtgaaaaccctgcttctcaaacaccaccacaaacaatatttgttcacttctattctgcaatgcacacagtttttgagctacaacaccatacacctgttaaaaacaaaactagtaaatacagtcaaatttctttgcatttctcgtaattcttcaaaaatatttataattttatatgctttattggtgaatgtatgtgtatatatgcatatatgtttgtgtttgtgtatgtgtgtgtatatatatatgcatgtgtttgtgtgtactgagaaaaaccttaattcctgtttattcagtctcgactttgatctcaactactctatataatcattttaatctgttgttggttacatttttttcacttcttttttgacaataaatgcatatacacttttattttatcttctttattattaaagagatagcatattgtatgcacactctatattttgctttaactcttaaaaatatatttaaatttatcaatttacaattttatgtttagtattctcttattttttgtttaagaattctttacctgcccaaagatcacaaaaattttccactatattgtcctctaaaatttttaaaaatcttgcctcttacggttcagcttttaatctctctagagacaattttgtgtgtgatatgaggggggtacccattccatttttaaaatgagtttccatttatctcatacactttgtcaaacagtctattctttgcccagtgatatttggtgtcggttcagctctacatcaagtttccacacattcatggatctgcttctggactttctattctgttttatttgttactccgtctattcctgagaaaatcttctgtctaaaactttcagacatatttttatgttattaactttcattttaggtgcggggtacgcgtgcaggtttgttatataaattgtgtgccatggaggttggtgtacagattagttcatcacccaggtcctcccacactccaccctccaccccacaataggctccagtgtttgttgttcccttgtgtccatatgtatttaatgtttagctcccacttataagtgagaacatgcaacatttgattttctgttcctgtgtttgttcacttaggatgatggcctccagctccaactatgttgctgcaaaagacacaatctcattattttttatggctgtgtagtagtccacaatgtatatgtcctacagtttctttatccagtccatcactgatgggcatttaggttgattccatgtctttgctattgtgtatagtgctgtcataaacatacacatgcatatgtctttatggtagaataatttatattccttggggtatacacccaataataggattgctgggtggaatggtaattctgttttaccttctttcagaaatcgcccaactgctttccacaatggctgaagtaatttacattcccaccagcagtggataaattctcccttttctccataaccttgtcagctgtcagcaactgttttttttctttctttttttttttttttttttactttttagtaatagccgttctgactggtttgagatggtatctcattgtggtggtttgatttacatttctctatataattaatgatgttgatatggtttggctctgtccctacctaatcttgtcttgaagtccaaggtgttgcgggagtgacagatgggaggtaattgaatcatgggggcaggtctttcccttgctgttcttgcggtagtggataagtttcatgagatctgatggttttataaagatgagtctccctgcacaagctctcttctcttgtctgaccccatgtgagatgtacctttcaccttctgccatgattgtgtgtccggaattggtgggttcttggtctcactgacttccagaatgaagctgcggatcctcgcagtgagtgttacagttcttaaagatggtgtgtccagagtttattccttctgatgttcggacgtgttcagagtttcttccttctggcaggctcatggtctcgctggcttcaagagtgaagctgcaaacctttgtggtgagtgttacagctcttaaggcggcgtgtctggagttgtttgttcctctcgtctggagttgttcattcctcccggtgggctcgtggtcttgctgacctcaggagtgaagctgcagaccttcacggtgagtgctacagctcataaaggtagtgtggacccaaagatttacggcaaagagcaaaaaaacaaagcttccccagcgcagcaagagaccccagcagcttgccactgttggctggggcagcctgcttttatttccttatctggccccacccgcatcctgctgattggtccattttacagagagctgattggtctgtttcatagagagctgattggtgtgtttacaaactttgagctagacacagagtgctgattggtgtatttacaatcccttagctagacacaaccattctccaagtccccaccagattagctagatacagagtgctgattggtgcatttacaaaccttgagctagacacagagtgctgattggtgtatttacaaaccttgagctagacacatagtactgattggtgtatttacaatcccttagctagacataaaggttctccaagtccccaccagattagctagatacagtgctgattggtgcatttacaaaccttgagctagacccagagtgctgattggtgtatttacaatcctctagctagacataaaagttctgcaggtccccactagactcaggagcccagctggcttcacctagtggatcctgcgcaggggccgagctgctggctggcagagctgcccgccagtcccgcgctgtgcgccagcactcctcagtccttgggcggtcgatgggacccggcgctgcggagcagggggcggcactccttggggaggctcctgctgtgcaggagcccacagcggggggtggggctcaggcatggtgggctgcaggtcccaagccctgccccgcggggaggcagctgaggcccggtgagaatttgagagcagtgccagcactgctgggggacccggcacaccctctgcagctgctggcccgggtgctaagcccctcactgcccaggacctgcggcgctggcctgctgctctgagtgcggggcctgctgagcccagcccaccgggatctcctgctggcccacaagcaccccatgcagccccggttcctgcctgcacctctccctccacacctccccgcaagaagagggagtcagctctggcctcggccagcccagagaggggctcccacagtgcagcggcgggctgaagggccagagtggaggctgaggccgaggaggtgccaagagcgagccagggctgcgagggctgtcagcatgctgtcatctctcaattgtgaggcctcctcagcgacatggaactgtaagtccattaaacctctttcttttgtaaattgcccagtctctggtatgtctttgtcagcagcatgaaaatacagatgttgaacattttttcatatgcttgttggttgcatatatgtcttcttttgaaaaatgtcagacatattttttagttctagaatttccattttaaacaacagtaactttttctctgctggaggattttcttctttaaaaagcagaattaaaattcattatgaacatattttcttctatgcttctgaggatagttttaataaaatccttttctgctaattccaacatctgtccagtttccactgattgattgtctctggaatatgcatcacattatcctatttcttcacattattctaattattctatttttttctttataattttggattatcctagacattctaaatgatattttggattctgaattctgttatattcttctgaacagtgctgaatttgcttacaattaactttgctggactctaacttctaactcagtctaccttgaaggtgaaatcttgtttaactcctttatccttagcaggctgtttaggatttgcactacacacgcatagcttaggggtcagccagagatttgggcagagtttatatgcagaatttgtgactctcctttctggttgtctcctttcctggacttctcccctcacttttagctgctgtggtggttcccaaactctgttatttgatatttcaagccactaagattatagacttctatttgagatttagccaactaatgcctaccctcaaataaagacccattaaagaatagataactcacccagttccatttccttcatctaagtacaggtcccccactccagcttctgcctgcttttagttgctttccagttgttccagggaattggttttttatattttgcctagattttttgtggttatatgtggagagttagtttgatgggagctactgaatcattactgggagcaaataacctgattattgtatttatttagcttctgatcagtcttagatcttgcatgacaaacgcttaccttattttaattcttcagtgtcttagctattcttgtgtagaagctgaagtcttatccagtatacttttctacctctcaggtccttctaaatggaaggaactgcaaattagccataccaaagagaggatatgtggaagagaggaaaggaagctaaacagcttcctttctgtgctgtccataaatccgtaccgccagggatcataacaatttgaggtaccaccataatatacatatgcatgtctggtgtgtttggagaaggctgtttaaaccaggactgaacatttgaggataagaagcttgtggttgggagaagcaactgggaagtgtggaaatgaagacagaggtgagttagtaggctacttactgcaggaatcaggtgagatgagaagctgagctaaagcaacattaatgagaatgtagaaagggaccagattggaaagataattaaaaattgataaaccggccaggtgtgggtggctcatgcctataatcccagcactttgggaggctgaggtgagaagatcacttgagcccaggagtttgagactagcctgggtaacataatgaaaccctatttctacaaaaaataaaaaaattagttgggtgtagtggcacatgcctgtagtccgagctacttggaaggccaaggcaggagaatcacttgagcccgggagttcgagtcttcagtgagctgtgactgcgccactgcacttcagccagggtgaaagagagagaccttgtctcaaaaaacaaaacaaaatgaaaaaacaagaaaaacttgataacccctgtgtacagattgaaagagatacttataaggataagaaacattttctcccatcactcaaatcacagcaggtgtcaacatcttacttcgctgacacatgtaataatatagaaagtctagaaaatagaaaaaaattatcaaaaattccactatctttatataactaaaaatgttttatcttccaggccttatttagaaacaaatgtatatgttttatagctacaaccacacacaagtttgaaggtcttcgatacatcataattttgcattatttctatcatctcgcatgaatgagcaattttcatcatgctgatatctgtaattatgtccttttaaatgtcttacatagtattccatcatttcatacaccccaaacttttaaactattattcaacttgttgtacatttatattattacaactataaataatgtaccacaaacatgtttatgtatatagtctttctcttctatggggggtatctctttagctgtaagatatccatggtgaaaagtagaaacatttaatattgttttatgtatattgatatttagtcacaagagctctgacattgtaaagccccagagtgatatgtgtgagaatctttgaatttcagataattactgagagaaaggactttgctttgtagctccaggagctagtactgtggctaggcatattagaccagtaatagctgtgttttgaatatgtaaatcaatgattaaatgaatgattaattcacttgtcttgtgatgagagttttaagatgtttcttgccatctggatgcagtatgatttcaagtgtcccctctgatactggcaaggtctggagagccattaagacaaagagtttactcctgtgagctgggttctacggaagtctggaatgctgccctgagaacacaatctgcaacagtatctgtctgagatttttggttttgtttcctccaccactataaacccaagcatttccatgggctcccttctgaaaaagggaaggtgatatttcctggctgaaggagactttcccattaatgttttacctcagtgtagcaagcacgctaagcttgggtcagaatgtttgaatgttttggctctgttctcttgtggacttcagaaaacaactaagttcattctcaacttaaactggatcactgtttttgttttgtaatgatttttcttgtaaagggagaaaaataattttggttcagatcaaattgtaaaaaaaagtttaagatttagctgatcagaataaggcttttgagatggagattttatatcaatatcatttgtgtttttactagcactagtaattactatttatagcactctgtgcctgtccctgctctagtacattttttttttacattatttaacttactttagtcatctcagcaatcctatgaagtagatattactttcattttgtaattatcgggaaaatgatgcttacagaacttaactcacctgcccataagcacacagaattggtaacagtcagaattgaaaactagatctgtctgatatcaatatgctcacacatccatttgatttttgtttgtttatttatttatttattttgagacagggtctcattctgtcacccaggctggaacgcagtggtacaatcttggctcactgaaggctcacagcaacttccgccgcccaggttcaagcaattctcccacctctgccttccaagtagctaggattacaggtgcatgccactcactatgctaggctaactttttttttttttttttttttggtagagatggagtttaaccatgttggccaggctggtctcgaactccagacctcaggtgatccgctcacctcagccttgcaaagtgctgggattacaggcatgagccactcacacatccatttgaaaagcactttcacataaattttattttctcattcacagttgcaatactgggaagagggctgtgcttagtcctgcctggcataggtaaagacagagatttacagattatgtgttttgccatccaaggtcacactggagagagttatcagagtcagggcataaatgaaaaccttctggtcttcatcccgtaccctttccactcttctcacggactccctagagattttctctctcaatctctcactttatgtttgagcaaatggaagcccagaatattgcaatgattcatcaaggtcatacaactagttagcaaactgatgctagaggctggattttttgcctcccgagctagcgtcttttctgttaggtctatgtagcaaacaaaacctgattgttaaggaatgttcaatgtgagttacaatccaagccagggaagacattaatataggccatccagtacagagcccttcactcatcattttcatttttaacaaatgtcctccctcatttgagatacccagttgatgtgctcatcatcaagtatgcactgaaatgatgagtatgaatgtgtcctgcactggggaccagccccgagtgggtcccccattgtcagtatatggagagtctcaggaatagcaactctcccttcctcagtgtagacctcgaaacagccaaagtaaatagaattttccacctcaacagctgtatttattttgggctgtttctccacctacaacgcccatttgctgttctcagagcttctgaacctgtttattttcaacctcccagaggcagccagctgttgtattcccatttcaaggcaaaaagaagtcaacatgttcttctggagggaagcaacccattttaagatcttaaaggatatcacccaaaggagagtttaccagctgtggatatttcctgagcaagacactattcctgctctcaaatatcttattcaagtggcttaacagatgtaattggagacagagcttgagcgctgaaaattacatagtaatataaaagagctagggagcaatatgagctcgagatttaagtgatgtcaagtgaatgtgattgagcagagcctccccatcagtaggctggattaagcctataggaatattttgtttgggatccaagtttgtttgtgtatgtgtttgtttttcagtgagccaatatttaaaaattgagagactttacctaaaagtctgatttctggcttcgtttgaaataccagaagatctgtcaatacgtgtttgtccttattggggcaccagtnnnnnnnnnnnnnnnnnnnnnnnnnnnnnnnnnnnnnnnnnnnnnnnnnnnnnnnnnnnnnnnnnnnnnnnnnnnnnnnnnnnnnnnnnnnnnnnnnnnngaattctgccttgcaaaatcagtatcttcagtaatgacaaaagccagattggagtttgtgttggatgaaaatctaactacctcttcttgtaggaaaagtatttagaggaagaaacattcattgaccatttacacatgctataaactgaacccaatgctacaaaagttggcagtgcataaccactaagatagtcctatttacaactggagaaagcagagagggaagagaaagtagaggcagaatgggagagagccaagcaggaagaacatgcagcttccaaaattcaggccacatcaaggtgttgtgtcatcattttgtgtgaggtaaaaacttagaaaacacaggatccaaagtcaaatatgaattatctactttggctttcttaagcaccaagataaacaaaatacctatatgacagaatatcacatatcaacataataacataacaacataacagaataaataataacagaaaaccatgccatcgaagactacctaatgacaatggaaaatgctcaccacatttcattccatgttgagggatcaaaggcgtagtattgtttacctctggctatctggtgttctcacatttcccatctcccagatataatccctgttgctattttatcattctagcattgttctctatatattcacatatagatatgtgctatatatctacaggtagacatagatatagatgacagagataaacattgaagacttttgtgcttttcaatttcatgcatattttatttgaggaattacaacactgaataaagtttgctcatatcaacactattttcacactagattaaaaatgaaatccccatgaaaataatgtatttttagtctccaggcaatctccttaaatctggcttccaacaagatcatctataaaaatagtgtactgcttgtccatatcagttcgattaaacaagtctttaattaaggcaataccattcaggacatagaaaggggcaaatatttaatgatgaagacgtgtcacaacaaaagcaaaaattgacaaatgggatctaactaaactaaagagcttctgcacagcaaaagaaactatcaacagagtaaacatacaacctacaaagtgggagaaaatttttgcaatccattcatctgacaaagatctaatatccagcatctataaggaacttagacaaatttacgagaaaaaaaaatcccacataaaagtgggcaaaggacatgaacagacacttcttaagacatacatgcgtccaacaaacatgaaaaacagctcaacatcactgatcattagagaaatgcaaatcaaaactacgatgagatatcatctcacactagtcaaaacagctattattaaaaagtcaaaaagcaaaaagatgcttgcgagattgtggagaaaaaggaacacttttacactgttggtggtagtacaaattagttcaaccattgtggaagataatgtggtgattcctcaaagacctagaggcagaaataccattcgacccaataatcccatttctttatacccaaaggaatataaattgttctgttataaaaacacatgcacacatatgttcactgcggcattattcacaatagcaaagacatggaatcaacctaaatgcctgtcaatgataaactgaataaagaaaaggtggcacatatacatgatgaaatactatgcagccataaaaaggaatgagatcatgtcttttgcaaggacatggatggaactcaaggccattatccttagcaaactaacacaggaacagaaaaccaactaccacatgttctcacttacaagtggaagctaaatgatgagaacacatggacatatgggtggaacaacacacatcagggcctgtcggagggcgggggtgggaggagggagaaaatcaagaagaataagtagtggatgctgggattaatacctgggtgatgggacaatgtgggcagcaaaccaccatggcacatgtttacctatgtaacaaacctatgcatcctgcacatgtatccctgaacttacaataaaagttggaaataaaaattatataaataaaaatataaaacctgattatctaactgcaacgaaaaagtatttaagcctcttccatgagcttggtatttggataggcccagggaaaacaaagttttcttccaataaaattatgcaagtccctgaattcttaggacaccattcagaactggtcagcgtgcctttctaaaatcttgcggtctatgaaacaaaaataagaaaactgggaagccagattctcaaatcaaattgtttgatctagagctgcaaccaagtctagaatgcactggatacacagcaatggtaaagaaatgagcaactggtgaagtggatacctttgctgggtactaaaaatgaccagaatcaagcaaacatttctacccaaaaagagcaaaacaagatcagcagcattttatttttacaaaccccaaacagaaatgatttcaaaacattcaccctaaactacacttgctacccatttgtttctgtttaggctgtgtcaatgctaaattagcagttggcttagtgattccaggttatacgggttcaggtctcggaaatacacagttctggtttaagttaaatttcctatttgcacataacttccctgacctttaagtttccaaactgtatttgtgcaaattaggcacaaattgtaagctctgctgactcagatatattatgactagaaagttaagggaaagataaacatacaaagccaaagtaagaagcagttctaaagctgaaaagaagcctacaaagatgggatcaattgaagtaagtaactctgcatctgttatgaatagtttcacttcaccctctttcaacaccagaatccagtcatcttggctgctcctgccaccgcctccagcctatcatgctcaaagagttcatcacaagggttggccaacttggagaacctttcaatctgccagggccaaacctaagagggcagcaagccaggaaaagcacatgctggcatcacataacagcatgcatttcaatgttacagggcaaaataggagataaccttagccaaagataatttctctaatcctgacatcagaactggatactacatctattgtctttaaataaatttcccaacgaaggctcttcatcagaacaaataaattcattgactttcatgctctctcactaggcagtaatgtttgcttatgtactgcttactgcaactgacaacttatagttcccgaagttttatctgagggatactctcagaaatattttcccccaaaacattcctgatgtcaggaaacaacagatgatggagagaatgtggaaaaatagaaatgtttttacactgttgttgggagtgtaaattagttcaaccattgtggaagacagtgtggcaattcctcaaggatctagaaccagaaataccatttgacccagcaattccattactgggtatatattcaaaggattataaatcattctactataaagacacatgcgcacatatgtttactgtaacactattcacaatagcaaagacttggaaccaacccaaatgtccaccaatgacagactggatgaagaaaatgtggcacatatacaccgtggaatactatgcagccatataaaaggataagttcatgtcctttgcagggacatagaagaagctggaaacgatcattctcagcaacctaacacaggaacagaaaaccgaacaccacgtgttctcactcgtaagtgggaggtgaacaacaagaacacatggatacagggaggggaacatcacacactgggacctgccagggggtgggagcctaggggagggatagcattaggagaaatacctaatgtagatgatgggctgatgggtgcagcgaaccaccatggcatgtgtatacctaagtaacaaacctgcacattctgcacatgtgtcccagaacttaaagtatattttttaaaaagacattccattttaattgcatgtttaagtactgtggcatgtacatatattccttgtgatgaggtgaactgcaacaagaagaaaaatccaacactgtataatttaaagaggtttgagattgaagaacttccaggaaactgtagatgaacattgagtcataccatctccaaatgaatattattagatgtaaagactgcattctacatgtaacttacttaacttgaagtgctgttttctccctttcaatgtaacttttaaacatacatgaacagcatttctagtgtacttttatcaaacctgtccaggttcatttccctacctttgttatttagagaagggaaaaattaaaagggcccaagctgaaaattcttagggataaccccaagaagtagaatgtcttgatttgtctttttacaaaaatctttccttaggaacacaaaaggtaaaggagggaaagcctgagcagtagctgcttccaaacccactccatggcgagccaagaggccagttggctttgaggccaaattccccttccttaaagaggccttggtaatatcatgtcgttcttacaaaaggtgttcagatgtgattcttgccttctttcttccaataacccactgagttgagggaaggcaagggggagaagggagtggagcacaggagtaggaaaaaatgtgaagatgtccaagacaaacactgaacacaaagaccaatccttacctaaaaaccctggctggatgtttggggttgaaaagcctccttggagtggatgtggtgtgctgatgtgggcgttctgggcactagtttctcttctattctgtttttgctggccaacaacccctcttcctttcctttcattcttgccagaaggagttctcagtttaatctttgaggtgaacagataacccactggaacattaaaataagtgctacataatacagaattaactttagaaggccttggaacaaatgtgacccaggtttagagtgtggtgatctcaaggagaactctctgaaggagcaaaccaaatgttgcttacttaaaggcattcccaagccagccctttcatatcaaatcctagggctctactcggcatctgtcagtcaggatgaaagtaacaaggatgtcaccaggggtcctgagcagaacgagaaaaaggagagaataacctgtagagagcacttaatttcaggcagtgtgctcaagacctctgtatctcctcatctagtccttagaaaagctctcctagagactggagtctcactgttagcaccactgactgtacagatgaggaaatcaaggtaaactacctaaactcagatagctagaaagttgttgggagtagaatgccactgactgcaaaatgatcactccaggagagaagattttaactgttttttctttctgattccctccccattctcccctgagcattttgatcacataaacctcccagtcttctccaaatataccatgccctttccaacattgaagcctctgcacttacaggtccctaggtaagtaagtcccttaagacacttacttgagaatcagatgacgtcactgccttccctgggtattcacacttccaagcacaattgatcagggagtctctagatagcaggaaccttataaatgctatattataagtaatctattaactataagtatttaagtattgactttaaactgacagtggctgtctaaggtcttagctatgcaattacaggcacagcattcagcagaggctcaaaaaagtatgctgaaacattaaagtcaaataagccaattgggggatgggaaattatatattttatatataattttaggggatatatatatcccctaaaagagatagatatatataccctaaaagatacatatacatacaccccaaaagacatacatgtatttatctcctagaacacatatacatatcccctaaaagacatatatatatcccctaaaagacacacacatatatatatatctcccctaaaagatgacaaatcactgtcttttctttctcttcataactttcctaaagggagaaaaaatcatccaaataatttttgagagcttatgggagaggctgattaatgacatgtgcactaaaacctcaggtctgggaatagtccaccataaaaaactaaagtttatacccttaagcaaaacaacaacaaaatgtaagtaaaccattaagcatagaaagctttctgtgacattttaaaacactttttccccatctttcctaaggcacaagagacatggcctaacccaccactatgcacgtgaattatgattctgcaggcctccaaagaggtgcacagctgccgctgcctctctacctcctattaccagagtacaatcagttttcaggtttttacacctttttattattctcccatcaggtttcaactgtgctgtatacttataatgtcagagagtaagtggcctaaatatcccttctccaagcctctactgtgtcacttctggttagctgtggacttaaacaccaggtaagcaagcttgctgaaatcgtgaataacagaagaatgcacacacattccaaataagggcctttctcacaaacacatcagaagataaggggtacaaacatatgaaaaaatgctcaacattgctgatgatcagggaaatgcaaatcaaaaccatgatgcgatacaaccttactcctgcaaaaatggccatagtcaaaaaaatcaaaaaataatagatgatgatggggatacggtgaaaagagaacacttttacactgctgatgggaatttaaactagcacaaccactgtggaaaacagtgtggtttccttaaagacctaaaagtagaactaccatttgatccagcgatcctactattgggtatgtacccagaggaaaaagaagtcattatacaaaaaggatacttgcacatgcatgtttatagtagcaaaattcacaattgcaaaaatatgaaactagcctaaatgcccatcaatcaatgactggataaagaaatcgtggtgtacatatatgtgtgtgtatatatatgtgtgtatgtatatatataattgaatatatatatacacaccatgtggtgtgtgtgtacatatatgtttgtatctatacatatatacatatgcacgtatgtatatgcacgtgtgtacatgtatagatacacacatatgcaagtgtgtacatgtgtatacacacatatacacacgtgtgtatatgtatatatacacacacacacacacacatcattgaattagtattcagccataaaaaggaatgaaaaaatggcatttgcagcaacctggataaaattggaaatcattattctaagtgaagtaactcaggaatggaaaaccaaacatcgtatgaggatgcaaaggcataagaatgatacaatggactatagggactcaggggaaaaggtgggatggggctgagggataaaagactagaaattgggtacagtgtgcagtgcttgggtaaggtgtaccaacatttcagaaatcaccactaaagaacttatgcatgtaaccaaacaccacctgttccccaaaaacctatggaaataaaggatttttaaaaaatatattgacctttcaaaaaaaacaaaaaagattttccctagactgggccagccttaccctgcaaccagtcttctaccccttccttcatagatcagtcaaagaagatagcaaagtcttctcagggactttgagaacactaatcagttttacagcctgaagcaaagagagatctaattaatatgataaaggtttccagttaagtattttggttttccattatatttagtactgtccgcccagggcatacatcgggggggcaaggggagacagtagcatccagctgctgtgaaggatgagagatggtctgctctctgactcagaggattattgccctctttcctaaacccccaaggaataggctacacagaggcagagaattttggcagatttgactgaccagctcctctgaggacaggatgaaaagaggctctgctcagcatctgttcaacattccaaaagctcctgcaattccttgactgcaagtctttagagatgagggtctaggcctggcttattcacactgtgttcctaggcacatggacataacagatgcaaaataattatgtaatggctaattgatatcagtttttcacatgtgcctacctgcttaaatagcatagatgaagcataaaagctaataaaatcctaaatatgaaatgcatctctatcaatttgcaaacatacaaattttttcactgatataaatggtcagaatattcacatgatacccaggagatgaatcagtgagtgtgaagtgttggaagatttggcttacaataaaagtttctctgatggctaggtaagttgaagcaaaaaatgtaaataggtaaatcaaataattttaaaaaaagggacgtcatattcttgagtaattccttctttcctattcctctttaataccaatattatataaaatgaaaaggacaaaattatgcctaaaagtatattatttcatatttttaacttattgccaaaataaataaaaaagggattattcctaaaagtgtcccattttgtagatttttctcaaataaatagccagaaccatttataaccatatttaccaaattcatatcaaatgggtttcatagcctctttttataaagctgtgggacatcccaacagactagtttgggactgtaattgaaaggccagtgattcctctggatgatggtacactgacctccataacaatgaacaaggggcaattgaacaggtaatagttgtctctacccatgtccaaggggaaaaggtagaaaacagcataatgtcatagttgtcatgaagtttaaaaaatcaacctcttgctcactgagtgacaaggagcagcttacagtgatctcactgaatattaggttcttcatccataaaataggttcttcatccataaaatgccagatatactgctgatatttgagatgatcaatattaactgcctgccacctgtaaagccaaggacagccccactggttcagataccatgatcagcaagcacttcaagcctcactgaaaaagccaaaaccattttctcatttatggacttgatttatagccatggaaaataaacaataaatgagagcaaagcattctgtgactttccttcaaaaccatttaattttttaaacagtcaagaaaaagtaaaggaaaaagaagagtgaccaaaacaatactcaaaattactatgttgtatgtaaatttataacaaaaatataaagttaaaacaaaaaatattttaaattaagattagcttaaaatatagtgttcagctttcactctccttcaactttggtcacatatttatcacaaaatatcacaagacttttatttttctacttgaaagacaaaagaaagagccgtacaaaataaaatgtggcataggatactatcagcaattaaatatatgtgttttgagtactcaaatatgcaatctacttttcacggcaaacattagaaaaactggcaacttttatcaagaaatttcaatcaccccatcatattgctaaacatttttatcacttataaaattgcaatccaaagaaaatttatttgctgttgctaagagacatgaaaggaaaactttaaaacacccctttgtctctgattttcaaagtacatgtagtcaaaagcaaagaacatgtcatcatcaatggctgagtggaggtgtccagtgctagcctcttccacaaagaaccaaaacaacaaagagataactgcactttgagtagaatgtctaagagagaacactgcaagttagcaaggaagtggcaaaaagcctctggacacaaaaactcaggatagtatcacagagaaggaagtaaagcatccagcaaggattggcttgaaccaagaggaactctccattgtggagaaaaggtaagaggtagcctccgttgccaccatggatgcctgcaatgcttgctataggaaagccccacagtcctcacagaggactaagcggagtacactttagtcagggtacagggagctgcctaaagttaacatggctgcactgctccccagagaaaactcatgctgggtctcccccgcaaccgccaggacccaggctgctgcggcacagagccatattgagagaggagctactaccagagtgcatctttccctggggcctaatatccctgcaattccatatccctgtgacccctccactatctcaccatgcctacagagaaggctgcagcacaatgatgccaccctgaacccagtggtacggcaatgactcaggcatgcaagcccatacagcaacctgtataccaagaagcagtggcccagcatagagaggagactaccctcaagaccaagggagcccctatacgctcccaaggacctgagagtcagcctgcctggcaggccccacaccaaaaaagctgtgccactgcctacagaaacacccacagcccaggccactgaggcacttgcagacacagctgacactgaatacgccaaagaaagcacaagaagacaatactgttccaatccagaactaaaatgaaaacactctaccaaaccagcactacaagacacataaacagaaaaaaaaaaattatccttacaaaaactacataaaatcagaagcagtgagcacagatatcaatgtaagaccacaagagaagtgaaaagcaaggaatatgacacctccaaaggaaaactattctccagtaactgacaccaaaaaaggaaatttataaagtgcctgaaaaggaattcaaaatgatgatcctaagaaaactcagcaagatacaagagaatacagactgagaattcaatgaaaacaaaaacaattcatgatctaaatgagaaattcaacacaaatagatataaaaaagaacaaaacagaaatattgaggtaaagaattcaatgaatgaaataagaaaacaaaattaagagcttcaacaatagactagatcaagcagaagagactgatttttctaggaagaatttctaaagataaaaatgggtcttttgaaatagtcaagtcaaacaaaataaaaagaaaaaacaataaaaatgaatggagaaagccaataagacaatggaacacaaataagtgaacatatcttcgcattataggaattcaacaaagagatggaaaaaggtattgaaaatatatttaatgaaatactagctgaaaatatcccaagtcatggaaaagatacgatagctcaaaaatccttaagtaaatttaattcaaaaaagttctctccaaggcacattactgaaaactgtcaaaagtcaaaaacaaagagagaattttcaaaacagcaagagaaaagcatgaagtaaaaagggactccccatcatactaacagcaaatttatcagcagaaatgctaccagcaaaaagaaaatggtattatatattcaaaatgctgaaagaaaactgccagcaaagaatactgtacccagcaaaaatattcttcagaaatgaagaaataaagtcttttctagacaagtaaaaactgaagaaatccattaccactagagcaaccttataagaaaggcttatgggagtcttacatctggaagtaaaaggacaaaatttaacatcatgaaagcatatgaaagtatgaaattaactgacagagcagatacacaaggatgagaaaggaatcaaaccctatcactacagaaaaccaccaaagataaacaataagagaggaagaaaagaacaaatgatacacaaaacaaccagaaaacaacaaaataacaggagtgtgctctcacctatcaatagtaatcctgaatataaatggttggtttcaattctccaataaaagatatagagttgctgaatagatttttttaaaaaaagaaacaagacccagttatatgcatataagaaactcatttcacctataaagaacacacagactgaacatgaagggatgaacaagaatattctacacaaagagaaaccaaaactaaatgggagtagctatatttatattagataaaatgaatttttaagtcaaaaactataaaaagagaaaaaaagtcattatataatgataaagagatcaattcagccagaaaatataattattgtaaatatatgcacccagcactggaaaacccagatacataagcatgaattaatagatctaaatattattatattaaaagggagagacaggccccaatacaataatagttgaggacttcaacactctactgtcaatattgaacaggtcatctagatagaaaaatcaacagcaacaaaaatcagtctcaaattgcatcacagaccaaatggacctgacagacatttacagaacatttcatccaacagctactgtatacacattcttatgagcacatggagaattctccaggatagaccagataataacccaaaaacaagcctcaacctatttttaaaaattgaaatcatgtcacaatagaataaaactaggaataaataagaactttggaaactgtacaaataaatggaaatgaaaatatgttcctgaacaccagtagagtccagtagagtgatgaagaaaaattaagaagaaaacaaaaaaaattattaaactaaaatacaaacacaacataccaaaatctatgggatacagcaaaagctgaactaagaaaacagtttacagcaatgaacacctacatcaaaacagtggcaagacctgaaatgaacaacctcaaggaatttaaaaagcaaaagcaaatctttccttctaccaaagtcggtaaaagaaaaacaaatttaaagatcacagcataaataaacaaaatagagactaaaaaaatacaaaagatcaatgaaatcgaaatacagttgtttgaagagataaacagaatcaataaaccactagatagactaaccaggagaaagagagaatacccgaataaacaaaatcagaaataaaagaggaagacattacaattgataccacagaaatacaaaagatcagcgcttgttatgaacaactttatgttaacaaactagaaaacctagaggaaatgaataaatcccttgacacatacaacctatcaagtttgaaccaggaagaaatagaaaacttaaacaaactaataatgagtaaggagattgagtcagtaataaagtctcctaacaaagaaaagctcaagaatggatgactttcctgctaaattctaccaaacttataaaaaaactcacatttattcttctcaaatcactccaaaaaattgaagaggaggtaattcttcctaactcattctatgaggccagcattaccctaataccaaagcgagacaaagacactgcaaaaaaaaaaagaatactgcaagccaaaacccctgataaacctagatgcaaaaatcctcaacaaaacactagcaaaccaaatccaacaacacatcaaaaaattacacaacatgatcaggtgggctttatcccaggaatacatgcaaatcaataaacatgatatatcacaaaatgaacaaaacctaaatgattatttctataaacacagaaaaagcatttgataaaattcgacatcccttcatgataaaaattctcaacaaattacacatagaaggaatgtacctcaacacaataaaggccatacatgacaaccccatagctgacgccatactgaacaagggaaatgtgaaaggctttcctctaagaattggaacaagaaaaggatatccacttttaccactcacattcaacatagtactggaaggcttagccagaacaattaaggaacagaaagagcatccaaactggaaacaaggtaatcaaactgtttctgtttgcagacaatataatcttatatacagaaaaacctaaagtctccaccaattcttagaactgataaatgaatttaataaaggtgtaggacacaaaatcaaaatacaaaatttggtagcatttctataaagcaataatgaaagagctgaaaaacaattcaagaaagcaatctcatttacaatatctacttaccaaaaaaaaaacacaaatgcctagaaataaatttagcatgcaaaaagtgagtaagcatgctaccatttttcagttctgtaaatcctttacaactttaattttagtatttctcagcattgtgactgaacactgagatttctgctatattttacagactctcagataagtcattataaatctcctaaatatatataaatacattatttttcggggttcaattatgaaagtaaaagtcctggggggtggttattaattaaaacacatcatgaagttagcaacagcaacaagtaccacaaaaggcaatcctaagtgctatggtttgaatatttgtatggtttgaatatttgtatcatctcaaaattcatttttgaaacatactctcaaggtgattgtattaggaggtggaactttgggaggtgattaaagtgtaaggaaagagccctcataaatgtgatcagtgaccttataaaagagaacccaggtaaatgccttgccctttccattatgtgaggatgcagctagaaggcatcatctatgaggaacaggtcctcattagacacctatactgttagcaccttgatcttggacttcccaggctccagaaccgtgagaaataattttctgttgtttataaactgcccaatctagggaatttttgttacagcagcacctgtgaactaagaaactaagaatgttgcttagagttaagattaagatctcataggcaagagacatactctgccagccaagatagagaaaatgggacctgatttaccctcacatttgaaaacaactcaaaaatggaaaacataaatttaagagtggttttacactgaacaagcaacaaagcatgccgattcctggggggaaacaaataaaataatcatacaattgaaccagcttattgccaggagaacttacagattgtgacgcgaaaagcatgaagcaaggtggaacctagaagtctctctaagtagaggaactgggcctggaaatcaaagagaccaagacgcctagagtttgcagggcagaatagcaaagaggtgaaagctgcaaggacaaagaattctggagatgttcaggcttactccttgagtgtgcagctgagtaccgatcaacccatgcatatgagtaaactactagagaaccaactgaaaggattataggaaataatcctaactctcacatagttttagaacagctcctcctgttcacaatggtcagagtagaaagccttataattaacaggatatcaggtagaaaacttagaaggcttttgcctcagtaggaggtaaaactagccctgaactaaatgctgctctggtcctacctgagaaagcagaaagacagacataaaagggtcaaactctttccaagtgatttaactgtatcccttaacaagctcaagagtacgaaaatatctggaccaaaaagggtaatattacaatgtctggcctctaatcaaaaattactagacatgtaaagaaacaggaaaatacaggccatgagaagaaaaatcaattaactgaaaccaacatagaattgttacatgttagaataacagaaaagaacattaaaaaaaggttactgtgtatttaaaaagctagagaaaaatttgaaaagtgttaagatattcaaaagatcccaactaaacttctcaagatgaaaactacatctttggggtaaaaaagcactgaaagtattaatagcacattagtctatgtgagaaaaaaatgtgagattggatttacagtcatagcaacagaaattatctaaagttaaatggtgatttttaaaatactggaaaaaattgaatagaacatcaataagctgtggaacaacatcaagcagtcgaatatatgtgtaattggagttcccaatgaaggagaaacagaaaggatatttgaataaataatggttaaaattattccaaatctaatgaaaacaataaagctataaatccaagaagctcaatgaactccactgaacacatgaaaaaaaaaaaagacgctgtcatatatcattaaattgcttaaaaccaatgttaaagacaatctttaaaacagctagagaaaaaaaatacacattatctacaaggcaacaaagacaatgttgatggccaatttctcatcagaaacaatgcaagccagaaaagagtagaacatcttaaaagcaattttaaaaaaccgtcaacctagaattatttactcaacgaaaacatctttcaaaaataaaggcaaaatgagaatattaaaggataagaaatgttaaaggaaatccttcagacagagaaaaaataactatcaaggacaatcctgcatctcaagatccttaatcacatctgcaaagtcccttttacaacgcgaggtaacattcatgaattcctggaatgagaatgtagacatcctttaggggccataattctactaaccacacacctcatatgaagaaaccacttaaaaagatgttacactagaataaaaaatagtaatgcaagaaaaacatatgagaattctttttaaatggaagcctcatatgactgagaagaaacagacaaaaggacaaaactgacactctttcggactttgatgcctaggccattaccttttgaactgcatacttagtaatttaagattgttttcttcttaatcactccaagtatactacttgattccacagcaaatatttacataatgataatattgtaagtgatgttaagaaaaaaacaaactcatgagcaatctgaagagtgatttttaaaaaaaaaggtttctgcctgcctgcatcaactgctctatcaatcaaattgcttttcacttttaagggcaaaatctggcataagaggaattgaaattatggtaatttaactccatacaaatattttctaagtaacatttcttggtcaagtttcttttctccttcatactcttaaccaagctgcaaactttgatgctaaggggatttatggcccatcaagaaattcaataacttttaatatacattttccttacataaaatgcttcgatgcaagaccaaattgacctattatgtttattttagagctagtaatgcaatttcagaatatctgagaagctgcaaatgagtagaatttacctttctctatttgtatgcatacatccatgccaataaaaattagacatattcaaggtttcacattcaacagtaagagactagcattttaaactcaacctaggaggtataactttcgcaatcaccctaagttaataatttgtcataatattaactatcccccaacactcgaaaactagaaattccacaatcttacaaataggcttctcattctataattgatggattatctaaataaccataattaaggaaataaaaaaaaattttaagaataaacaattcaacattacttcccattcaaacactatctaactgggaatgacagttcgggtccttagtgtagaacataatgtttagagaaccaataccacacacagaactgattctctttagtgataacacagtggtgaaatatttcacttgattctccagtaatccaagttaaaggctttgaagtcactatatttgttcaccaacttcatccatttccatttaatcattaaaaccctgtttcactgaagtcaagcctgcttggccatcatttgagttccagagatgccaggccaacacttagtttcgcatgacagacctcagtgacccatatttttcaagcactcactgaaacttcctttgcaaagaactgctaatcattattgtgagaagagataagaacgctgatctgctcattgaaaattaactgacttcacatagagaacctcatcacctagaccttagcttcccttttttgatcttgataatcagaaaagaaattttgcctatttatattgatgtttttaagatttccaccagtactactaattactctacttccaacaggttacaatacataggaccacaagttgcaacatttagtattgctgcttacgtcctagggtcagccacctaaaaaaaaaaaaaaaaaaaaaaaaaaattgtccaacagcctttattctcttcagctgtaaaataaaaacctgacatctatgaggttgttacaacaggaataaagagtacattacatcaaatttcaaaagtttgcactgaaagtaaaggtaattcaagcaaaaatatgaaaaaatctcgaaaatgtattttcccccaaataattatcctaaatctaaaccatttcagctaaaatggttttactctccccactatgtgagttacttattacttgttcttttactttttaaagaaagacactaaggtatttataacaaaacctggacattacaaatttaaaataacaagctcagactttatacatttagtatgttcttgatcagtcacagagccaaaagagaaacaaacagaattaagcttacaagaaaataaaatagtaaaatattaatatataaaatagaaaaggaggttatataacagaatttattataccaaaattaaatgtaattctaacaaggctagagaggcaaaaaaaaaaaatcaaatgtaagtcatataagactttaaaaatcaggatattaaaccaacattgatatcacattgtttaaattaggtccttccttttagccataatgaatgtgtatatttcatggatcaaaaacacaaagtaattcttattatacaaatgctgttctagtaaacacacaagcattttttttctgatgtttgcaccttctttatactttcttccaaaaccactgctcctgacttacatcacaggaagaacaacaaaaaagagtaggaacttcagaaactgaatcataaaataagaatgcctgtttgcctaaggcgtttataatggctaacatgtttaataagagaatctatatattgtaggctctttataaaaagtacataactacagcattgactaaagttcaattttaaaagcctgaaattctcccatttttgtcttacaagacaggaaaagaagaccggatttaaagttcagagactaagttctgctcagggttcgacaataaaacagataagctaatagagctcatcacttaaattgtcctctctgactctcagctttccttaactgtagaattagtacaaccaccacagatcttcctaactccttaagaatttaatatgggattaacaggtatgaattcaatcaattcctgccttccacctatcacccaataaagaatcagttcattttaaatgaccttgagaaaatgtaattcattttcaatatcatttaaaataaacataacaaaaacattattttaaataaaattcttcttctacagaatccaaatagtataaattgaaacataagttattcaatgtttttagttctataagtcaccattcccctcaaacactgtaggtaaccaagaagttaagactcttaacacatgaagagtgaactctttcccatccagacccagtagactggttttttttacatttttgtactctattgacaaagttccaaaaagctacccttgaaaatgacaaagaagtgttagcacacaaaatgagcattaaaatctgcttgatgttcattaaagaaaaagctaaaaaaagaagggggagtctagcccccccgaaaaaaaaacttgtctttatatattttataaacatttcagaagactaatttctaaaattaacttgcatggtgttccttgcactaaacatctgtattactttcctaatgctgctgtaacaaaataatacaaacttagcaacttaaaacagcacaaatttattgtcttacagtttcagaggtcagaagtccaaaatggatttcactgggttaaaatccaggtgttgatggactgcaatcctactggaaactctagaggataatctgtctccttgacttttggagcttctagaggctgctgacattccttgcagcttccttccatcttgaagtccaacaattccaatcaagttgctctcacattgaattcctctgactctaactcctttgcctccctctttcacttactgccaatgtgattgcattaggcccacctggataacccaggctaacctctttaaggacagctgattggtaaccttaaagccatctgcaacctaattccccttgccatggtaacacagtcacaagttccagggatttgaatatggacatctttgggaggtctgtcttctctccaccactacatctgtcatacatttattgagagagtctattaacagattatagggatgaacaagccctatgggggtcaatttaaagggaaagacaaaagaacaaaactacaattcagtaggaaaaaatatataaacacaggaacacttagcaacaaaggcagatgaataaaaatttctttaaaataataactaaaatattatatatctgtctgaaagcccatgcctacgtggaatgttctacatactttaatatcattgtgaggaaagccctgtttaaaaaacgtcacaaggaatacggtcaatatcaatcagaattttagagactgttgagatctgaagatatctcaccaccaatctagtgttcaactgagacctagagaaattataactttcctaagatcacttggctagatagtttcagaaacaggactttaactcaatttccttatttctggtcaaaatactatatgacatagcacaaacaaaaaagttcactacggtgtgtttaagaaataagaataacctgtaatcccagaactttgggacgccgaggcgggtggatcacaaggtcaggagatggagaccatcctggctaacacggtgaaaccccatctcttctaaaaatacaaaaaattagctgggtgtggtggcaggcacctgtagtcccagctactcaggaggctgaggcaggagaatggcatgaacccgggaggcggagcttgcagtgagccaagatcacaccactgcactccagcctgggtgacagtgcaagactccatctcaaaaataaataaataaataaaataataaaaaaagaaataagaataaaatgtaattacagtttgaaaatatcaactacagatttgtgcaactataaatctgtatagtaaaacataagttattcaatgtttttagttctataagtcaccattcccctcaaacactgtaggtaaccaagaagttaagactcttaacacatgaagagtgaactctttcccatccagacccagtagactggttttttttacatttttgtactctattgacaaagttccaaaaagctacccttgaaaatgacaaagaagtgttagcacacaaaatgagcattaaaatctgcttgatgttcattaaagaaaaagctaaaaaaagaagggagagtctatcccccccccaaaaaaacttgtctttatatattttataaacatttcagaagactaatttctaaaattaacttgcatggtgttccttgcactaaacatctgtattactttcctaatgctgctgtaacaaaataatacaaacttagcaacttaaaacagcacaaatttattgtcttacagttttagaggtcagaagtcataaaagtccaaaggtcagagaaagagaaattatgtatgatctcacttatatgcgaaatctaaaaaagtcaaactcacagaaacaaatagtagaatgatggttaccaggggctgggtgggaaggagaggtgtggaattaggaagatgttggtcaaaggatacaaaatttcacacagacaagaaaagtaagttcaagagatctgtacacattgtgactacagttaataacaatgtactgtatacttgaaaactactgagaagaaaacagattttaaatgtgttcaccacacacacaaaaattaagtatgtaaggtaatggatatgttaattagctcatttgagctattccacaatatgtacatatatcaaaacatcatgttgtatataccatgaacatattaaatttttatgtcaatttaaaagaaaataaataataaaagttttgcagcttaaaggtataaagttcagccatttagcaaattcacctttgtataataacctcttgttcaaagatgttataaatgtgagacctcatatttcattaatctagttcacattacttcattgagatcttaccagatgccaggcaagtcctaggtaaaggggatacagcagtgaacaacaaattttaaaagccctgcttttatgaacttttatgaaatagtgaaggatcaggggaacagataaaaaggaaacaagtatatcatatgtcagaaagaggttgtatttactagtactgagatgtgaaggaagatcagagacgtgcattctcaatgtcacttaaaaacaaacaggatgtggaatgttaaaagctgatgacaagatgaaggagataaaatgtctaatatcttaaaaacacccaaacacacaagcactgtcataaaattgaatgagaacctctttctcaaaccccaaataaaaattaataccaattaaaatcaaactccatccaaactgtagaattggcagaaagaatagatgcattggtcaatggaacaagacacagaccccagaaatcaacccatacaatgtagtcaactgatttatgaaaaacacacaaaggcgattcaatgaaaaaagcatagtcttttcaacaaatgatgctagaataattgtatattcatacaccaagaaaaaaattaaatgaacctggacttggaccttatattttacaaacaatgcaaaatgaatcataaacctagacataaaatgcaaaacagtaaaatttctagatgaacacataggagaaaatctacatgaccttgggtttagtgatgagtttttagatacaatacaaaaaaacattatttatgaaagaagatagataaattggacttaataaaattcaaactctactctgtgaaagacactattaagagaatgaaatgacaaaccaaagattcggagaaaatatttagaaaacatgtctgataaagaagttgtatataaaatatacagcggggcagggagactcatgcctgtagccctagcactttaggagactgaggtgggaggactgcttgaggtcagaagtttgagaccagcctggtcaacatagcaaaaccccgtctctacaaaaatatttgaaaataaaatattagtagagtatggtggcactgcctgtagtcccagctactcagaaggctgaggtggaggattacttgagcccaggattttgaggctgctttgagccatgatcatgctactgcaccccagtcaaggtgatagagcaagaccctgtctccaaactaaataaataattaaaatatacaaagaattcttgaaactaagctgggcacagtggctcacacttgtaatcccagcactttgggaggccgaggcaggtggatcacctgaggtaaaggtgttcaagaccagtctgggcaacatggtaaaaacccgtctctactaaaaatacaaaaaaattagctgggcgcaatggtgcacatctgtaatcccagctactcaggaggctgagacaggagaatcgcttgaactcaggaagcggaggttgcagtgagccgagatcacaccattgcactccagcctggacaacagagtgagacttcatctcaaaaaaaaaaaagaaaaaaacaaacaaacaaacaattcttgaaactcaacaataacaacaacaaaaaaaagggccaaaaaaaaaaatctgaacagactcctcaccaaagaagatacatagatgacaaataagcatatgaaaagatgctcaacatcattatctcattagggaaatacaaattaaaatgatgagatactactagacatctattaaaatggcgaaaattttaaaaactgacaataccaaatgttgactaggatgcagagaaacaggagctctcaattcattgttggagtgaatgcaaaagctgtataccattccaaattttggaatacagtttggcagtgtcttaaaaagctaaacacagtctctatcatataatatagcaattgtgctcctttgaaattttatgtcaacataaacacctgcatgagaatgtttatagaagtcttatttatactggtcaagagctggaaacaatctcaacaggtgagtgtataaacgaactgttgtcatccatataatagaatactattcataggagaaaaaaaaaactggctgagggaggtggctcatgcctgtagtcccagcactttgggaggccaagatgggcagattgcttgagtctaggagtttgagaccagcctgagcaacatggcaaaaccctgtctccacaaaaaatataaacgttggccaggtgtgtggtcccagctactcaggaggctgaggtggaaaaatcacctgagcccaggaagttgaggctgcagtgagccatgatcgcaccactgcactccagcctgggtgacagagggaaaccctgacacacacacaccccaaagtaaactaaaacaaaaacaagggcctatgtgacagagcacgaccctgtcccctcccctccccaaaaacacaacaacatagataactcttatatgcatatacataaatatgatgttgagccaaggaaaagattatgtactatatgacatttgtgtgacattctgaaaaaggcaaaactacagtgacagtaaataggtcaatcattgccaggggtttcagaaggggtgagggttgaataaatatagcacattggatttttaggatatgaaagtattctctttgatattctaatgggggatacatgacattgtaaatttcaaaacccacaaaatacagagctaaccttaatgtatgcaaattgtaaaaaatcatttgggaggttggagaatccaagatggaatgcaggctgtggtgaaagaatctagcaaatgtataaaatacactcagtgacggaatgggaaagatgctgacctgagcatccttacaaataagtggagtaggtaagactaaaggcaaaaggcactgtgcataagctctgtggataaaactgtttctcacagggtatttagttaggaattctaaaatcactattatactgtatactggagttgaacaatgcaaatggatcgtggctcttgggagccagatctctcagtgtttgaatgacagtttacagagaagcaatgagagaaaactccaatgagccatgtggtaacagattaagagttgaagtcatcagtataaacacatatttggcttaatatagacagacacaaatacaaatatttataaatatgtgaacatacacagattattatacacaacatatttccttgctctgtcagctgaaagagcctagaagcaacacatcccagtagcaatgagcatagcagatcttggtttctagtaacagtctccaataaaagaaaccagggctccttggaaaaaatcattgattctagcactggagcagggaatatacaagatgtgcatgagcatcttgtagtgccagaaattaagaaagtactcaaaaacaacaacaatgcaacagtgggggtatatcaaagggacacagtagccaactgaaagagcttccatggccaaagctacaacagtctgatcaatgaaataaacaagtattagattataatccaaagtataaaataaatatccatactgacatacatacatgcatgcatgtatacacagagaagagaccaatctcttatgcagaagaattccgaatagttgatgtagatactctcctctcacagaagtgcagcatgactcctactcacacatgggctgcacgcagtgccttcaataccattacaatggaggaacctgatgactaccacctcagccaggtgatcaagattcacatcaacagtaaaacatgatgctgacacaatagtgtacacccttaatatgaggagaatggtactttacctctttagacttcctccccaaaaatacataatcatgagaaaaaaacatcagacagatcccaactaagggatgttttatggaatacttctcaaaactgtcaaaatcatcaaaagcaagaggagtctgagaaactgtcacagccaagaggagccaagggagacatgacaatgaatgcaatgtgatattctggatagagtcccagaatagaaaaagaacagcaggtaaacactaaggaaatctgaataaagtatggactgtagttcataacaatgcatcattactggctcattaattaatataagatggtaataataaggggaaactgggtttggcgtatagggggactcgctgtactatattcataactttatctctaaagctgctctaaaataaaaaggttgtttaaaagtatctactggaatgaatgacaaaatcttaccagtgaagaaaataagaaacctccattaggtctctaggtaccaatttaagcacatctgaaagtctgattcatcccttaaatatttaaaaggcaggaggccaatatgttatcttttttctaatttttaaatttttttgaaaaagtacaaatatcctctggattgcaaaactgatactttaatattgatttttttcttaagtatttgaaagtactggtaacaggataacaaaataaattatttttttaaaaaaagttttttacttaattaggtaaaactgtggtcaactgtgggtgtcatttggacctgggtttttcctgcaactatgagagccattcactacagaggctcccagagctgagtcttagaggacttcaccaacgatgcctcagtagagatgacctgtaagcaccacctgctacctgaagaacaagctggcttcatatatcctacactagaggctgaaaacaggtggtattttacttggcccataaatatttttcgtaatctgaactagttgtcacaataaaaattgggagactgcttgtaaaaattcaaatttctaccacttggtttgaaaaacaggaagatttggccacatctggcctgcattttcacaggacaacaaccagatgtaatacaacagaggcagcccctttaaacaaggcatagctatctgtctagtttgcctcaatctccaccactccctatgttcagtatcccaggccactttacttattacttagagctctgcaaccttccatcctgttactcctggaatttgaaaaacaacaacattggagacagaccaacagtatgtgtaagctaatacaaataacagcatttttatgtcatgacctagaagtactctgaattatccaggtaataatgaacagccacactaaaaatgcccaaacagcattcattgcttaattccggttcaggaaagaagtcaataggatggagatgtaatagataaaacaagatataaatagatatattctgctaaatcctatctcctgacaaagactaatccctcccaacctccagagcaacaacaaaaatacccaacactgtaaaatagtgttcttctctgtcactaactccaattagccccagtcaggagtttgggttgttcaggtatgttcttgcattggttggaggtagtaaacacagacatccctggcataccatgaaacgtaaagggacagggcccaaggaatactgcacccttccactcttccaagtactgaactcaagcgtccttctactgatgacaaaatgagcacaataaaaaggcacttacacgttggggcaatggaaaaatcagttatttgaaggcatctgtttctaatgtggagaaatttaattcccatgtgcgcaattttgagaacttttaattctggtgctggatgagggtagatttgcttgttctgattctgactttccaatccattaggcctctggtaaactctgatactatcactacaaattgcacaaactcacagactcctgaataaaagaaaaagtctgattattatttatgtaaagtaggatccactttccaaatctaactgcttcatcatcacagtcaacgttaatttctcaatttgcaaaactgagaaactaatttcttaattttgcaaacttgagaaactaatttctttttttccttttttctttatttttagggaaactagtttcttagagtgcttaggagatactatgaaaagttaaaacatgtaaagactaatcgtgtatcctatctaaatgagtatatcctgaattcttagcataatagagaaataccttgtattagttgctagtgctgctgtaatgaagtaccaccaactaggtggcttaaacaatagaaatttattgtctcacaatttctggaagcagtaaatacaaaagcaaggtgttgacagggttggttccttttgaggggtatgagagaaagatgagttccatgtctctctcattggcttgtagatagctgtcttttctctgtgtctcttcacactgtcttccttctatgcatatctctgtatccaaagttccccttgttaataagaataccagtcatattagattagaacccaacctaatgatcttgctttaacttgattaccgccgcaaaagccctatctccaaatgagctcccagaggtgaaaatgtcaacatctgattttgggggaaagggagacacaattcaacctgtaataacatgttaatggatacacatgtatgtatgtatgcatgtctattaattcagtatagttatattatcttgatccttgataagcatggttctagttgcatatatgtatgtatatatgtattcctgttagtgtgtatttgtaacacacaatgtaaaacttttttctatttctttcctttctacatacataacacagatcacacatatatatccatacttcactgctaaacagaggtgtttcaagccaagtctgaaataaacactcaaaatcggacatattttccaagggaggtaaagattacagtgtaaccaacaggaatgttcaagccagcaataatttaatttagtagctgagccaaaccatgacagtctacttttaaaataagtaaacttgagaatgtgatattgttacaattcttaactatggcatgcaagaacatttcttttaaacttcaagtcacacaaatccattttgtatatttattttttaaaggaaatgtctattcagcacatttggaatttggaagcttgaaaataactgaatcctttttcctgttgggtgcattttaacaccaaatgtaaatgctattatgaggttccagttaccacaggactcaggcttcatgcagacttagtttgatgaaagtctcagaaggaaatactcatggttcaggttccaatggatgaaggcattcaccctgtgaaacacagaaagtgctaccttttttaaactgtaacaaaggtaaccagttatgactcttcaagtgtcataactgacacttgctcttgctcttccttttaaaacgtttgagtagtttttaaaagatcatgcctgtttataaaggtttacctaaggcaaatttgtcctatcaggtaaaatatcagaatgcagacaggtggtttctttttttttttttttaattatggttaaaaaaaaaaacataggccaggcatagtggttcacaccctgtaatcccagtgctttgagaggccgagacaggaggatcgcttgaggccagaagttcaacactagcctgggcaacatggcaagactgtctctacaaaacctaaaaaaattagctgagcctagtggcacataaccatagtcctagctattggggaggcttaggcaggagtactgcttgagcccaggagttcaaggttgcagtgagctatgatcacaccactgcactctagcctaggtgacaggagccagaccctgtctaaaaaagtgggatgggaggagtaacaaaatttaccattttaaccatttttcagtgtacattacaatagtgttgactacatgcacattgttgtaaaaaagaaacacagaacttccttatcttgcaaaaccaaaactctataaccactaaacaactctccctttcttcatccctatcccttggtaactacccattctactttctgtttctaagagtatggctattttagatacctcatgtaagtggaatcatgtggtatgtgtctgtgactggtttatttaagttagcatgatgacctccaggtttatctatgttgtagcatatgacaggatttcctttttttaatcctgagcaatattccattgtatgtctatatcacatttttttatccctgtctctgctgattaacatttaggttgtttccacctcttagctactggaaataatgctgcaatgcaaatgggtgtgcacatatctccatggggtcctgttttcaattccttgtatataaacccagaagtgagattgctgaattatacggtaattttggttttaattttttgaggagcctctgtatcattttccctagtggcatcactttacattcccaccaacagtgcaaaaggattgcaatttctccagatcctaaccaacacttgtttttttcagtttgtttttttttaataatggccatcctaatgagtgcaaggtgatacctcttgtggttttgagttacatttccttaacaattacttgatgttgatcttttcatgctgatgtttatattttcatgtttgttggctaactgtatatcttctttgatatattcgagtcctttgcccatttttaaattttgatgtttgttattgagttacagaagttctttacatatattggttatgtacccgttatgagatatatggtttgcaattattttctcccattacgtagactgccttttcactctgttgattttcctttgctgcacaaaagtttttaggtctgatgtcctatttgtctatttttgcttctggtgcctgtgctttttgtgttaaatccacaaaatcattgccaaacccaatgtcatgaagcttttcccctgttttcttctaggagcttaataatttcaggtattacatttaggtcttaatccatttaattttttttaatctggtataaggttataccattcttctgcatgccaatatccagtttttccaacatcatctgttgaagagattgtcctttccctactagtagccttggcatctttgtcaaaaatcatttgactatataggcgaggatttatttctcgattctctattctgttccactagtctgtatgtctgggtttttttttttgttttttttttttttttttgagacagggtcttgctctgtcacctgggctggagtgcagtggcgtgatcacagctctctgctgcctcaacttcccggactcaagcaattctcccaccttagcctccagattagctaggaccaaaggcacacatcactacacctggataacttttgttattttttgtagaaacagggttttgccatgttgcccaggctggtctcaaactcctgatctcaaacgatctgcccacctctgccttccaaagtgctgcgattacaggtgtgagccaccacactgggcttatatgtctgtctttattccactaccataatattttgattgctatggatttgtaatatgtttttaagtcaggacatacgaggtttcgagctttgtttttcttttctcaagacttttttggcttttctgggtcctctgagattccatatgaattttagaatttttttttctatttctgcaaaaaataacactgctatttcaatagggcttatattgaatctgtagattggtttgggtaatagggatactttaacaaaatattaaggattccaaaccatgaacacagaaggtctttccatttagttgtgttttctgcaattttttctgcaatgttttgtagttttcagtgtagaagtgtttcgcctcattggtaaagtttattcctaagtattttattctttttgatgctactgtaaatgtgattgtttcctcaactgccttttcagattggtcattgctgagtatagaaatgtaactgacttttgtgtgttgattttgtgtcctgcaactttgctaaatttgtttattagttctagcagttttatgtgtgtgtgtggaatcattagggttttctacgtacaagatcatgtcacctatgaaaagatcattatatttattcctttcctatttggatgctttttgtttttcttgcctgcttggtctgggtaaaatttttaatacaatgttgaatagaagtggtgagaaaaggaatccttcccttgtgcatcatcttaaagagaaaggattcagttttcaccactgagtatgatgtcagttgtgggcttttcacacatggccctttatttcattgaggtaatttccttctattccttgtttggttagtgttttgtcatgaaacggtgtatgactttctcaaatgcttcttctgcatcaattgagatgatcatgtgttacatttccttcattctgttaacatatcagtattaccttgatttttatatgctggaccatacttgcatttcagtaataaatcccacttggtcataatgcaccactctttcaatgtggtgttgaattcagtttgctaaaattttgttgaggatttttgcatatcctggttttggtatcagagtaatgttgaccttgtagaatgagtttgcaagcgtttcctcctctacagttttctggaagagtttgagaaggactggtgttaattcttatttaattgtttagaagcattctccagtgaagccatctggtcctgggcttttgtcaggaggcttctgattgctgattcaatctccttaccagtatatgtccactcagatattttatttcttcataatttggtcttgattgtacatttctggaaatgtatgcatttcttcaaggttatataatttgttggtgtataattgttcatagtactctattatgatactttacatttctgtggcatcagttgtaatgtctcttctttcttttctgatttttgttatttgagtctttgttttcttcttattctagctaaatatggaactgttgattttgttgatctttttaagaaaccaactcttagtttcatagcctttttttttactctttttctattatctatttcatttatttggactctaatttttattcctcccttccttctgctaactttgggtttagcttgttcttccttttctagtccccttaagtataaagttaggttgttgattggagattttcttaatatggatgtttactgctataaacttccctcttactactgcttttgctgcatcttatgtgttgtgctatgttgtgttttcatattcatttttcaatatattttctaatttcccatgatttcatctttgatccactgattattcaagagtgtgttgtttaatttccacatatttgtgaattttctagtttttcttgtgctactgatttctagttttattacaatatggtctaaaaagatacttgatatgacttcaatcttctcttaatactagttttgtggcctaccatgtgatatatcctgaagaatgctcctagtgcacttgaaaagactatctattctgctgttttggtgtgcagtgttctgtatgtatctgttaggtccaattggtctatagcattattcaagtgctctgtttctctactaatattctgtctggttattaaaagtggggcactgaaatattctattattattatgttactatttctcccttcaattttgtccatgtttgccttatatattttttgtgttctgctgtaaagtacatgtacatttatcattgtcataccttcctggtgaattggccctttcatcattacataatgtacttcaaaaattttttttttatttcagtagctttaggggtatgagtgattttttggttacatggatgaactgtaccatggagaagtctagaattttagtgcacccaccacctgaacactatatccaataggtactttttcatctctcacctctctcctgcttgcccgccttctgagtctccaatgtacattataccactctgtatgcccttgcatatccataagcttagaaaccacctgtaaatgagaacatgttggatttagattttgattccagaattacttcacttagaataatagcctccagttccatcccagttgctgcaaaagacattatttcattcttttttatggctgagtagtattctacaatatatatatgccacattttctttatctactctttggttgatgggtatttaggttgattccgtatcattacaattgtgaactgtgctgtgataaatatgtcttttttatatattgatttcctttccattgggtagatactcagtagtggaattcatggatcaaatctccatactgtattctatagaagttatactaatttacattccaaccagcagtgtataagtgttcctttttcaccctgtccatgccaacatctattgttatttgaatttttaataatggtcattctggctggggtacagtagtatcttgttgcgttttaacttgcatttccctgatgattagtgatgttgagcatttctgcatgtttgttggccatttgcaaatcatcctttgaaaactgtctattcatgtcctttgcccactctttaatgggattatttgttttttcttagtgatttgagttccttgtatgttgtcagatgcaaaattcgcagattttttctctcattctgtaggttgtctatttaatggttatttcttttgctgtgcagaagcttttgtttaattaggtcccatttatttatttttgcttttgctgcatttgcttttgatgtcttattcataaattctttgcttaggccaatgtccagaaaagtttgtcttctagaattttcatggtttcaggtcttagatttaagtctttaatctatcttaatttttgtatatggtgacagataggaatccagtttcattcttctacatgtggctattcaattttcccatcaccatttatttaatgggatgtcctttccccaatttatgtttttgtatgctttgccaaagatcagttggttgtaagtattcggctttatctctattttgttccacggtctatgtaactacttttttaccagtaccatactgttttggtaactatagccctgtagtgtattttgaagttaggtaatgtgatgtcaccttcagatttgttctttttgcttaggattgctttggctatttgggctctattttggttccatgtgaattttatgattttttttctaattatctgaaaaaacgatgttggttattttgataggaattacattgaatctgtaaattgctttgggcagtatggtcattttcacgatattgattcttccaatccatgagcataaggtgtatttccatttgtttgtgtcacctgtgatttatttagcagtattttgtagttctccttgtacagatgtttcacttccttggttatatatattcctaaatatttttgtataactattgtaaaaggaattgagttctcaatttcatactcagcttggttctcagtgcatatagcattgctactgatttatgtatattaattttgtaacctgagactttactggattcatttatcagatctaggattctttggaggagtcagggttttctaggtatatgatcacatcatcagcaaatagacataagtttgacttcctcttttccagtttggatgccctttatttctcttgcctgattgctctggctaggacttccggtattatactgaatagaagtggtgaaagtgggcatccttgtcttgttcccattcttagggggaattctttcaagttctcccctttcagtattatgttagctgtgaatctgtcatagatggcttttattattttgaggtatgtttcatctataactagtttgttgagaatttttatcataaagggataccagattttatcaaatactttttctgcacctattgagaaagaaaaagtcggaataaaacccacttcatcatgaatttttttttttgttctggttcattccatttctagtattttgttgaggatttttgcatctatatacaacagggatattggtctgtagttttcttattttgctaggttctttcttggctttggtatcaggatgatactgactgggtcgaatgaggtagggaggtttccctccttctcaatcttgtggaatagttcagtagaattgattccagttctgcttttaatgtctagtagaattcggcttgaatccatctgccctgggctttttttgttgacaggtttgtttttttggtttgtttgtttgtttacctgattcaatctgacagcctgttattggtctgtttaggatttctatttcttcctgactcaagctagggtgtcgtatgtttccgggaatttatccatttccgctagattttctagcttgtgtgcatagaggtgctcatagtaatctcaaatagtcttttatatttctgaggtgtcagttgtaatgtctccattttcacttctaattgagcttatctgaatcttttctcttcttttcttggttaatctagctagtagtgtatcagttttgtttatctttccaaataactagcttttgtttcattgatttttgtactgtcttttcaatttcatttcattctgccctgatctttgttatttttcttctgctagctttgagtttggtttgttctttttctagttccctgaggcatgacattagcttgtcaatttgtaaccttgcagattttttgatgtaggtatttagtgctataaacgcctcttaacactgcttttgctgtgtcctagaggttctgagaacttgtgtcattgttatcaatcatttcagaaatttttcaattttcatcttgatttcattgttaacccaaaaatcactcaggaacagattaacttccatgtatttatacagttttgaggattactcttggaattgattttattctgctgtggtctgagaatatggttgatgtgatttcaatttttaaaaaatttattgagatttgttttgcagcttacatatgatctattttggagaatgttccatgtgctgataagaagaatgtatattctgcagttcttgggtagttcttgagtagaatgttctgtaaatatctcttaggtcagttagttctagagtccagtatttctttgttgactttctgcctcagtgctctgtctagtgctgccagtggagtgaaagccctctactattattgtgtttctgtctatctctgttcttaggtctagtggtagttgctttacgaatctgggagctctggagttaggtgcatatatatttagaattattttatcttcttcatgaattggatccttttatcattgtataatgaccttgtcttttttttttttactattgttgccttaatgtctgttttatctgatataagaatagttcctcctgcttgcttttggtttctgattgcatgaaatatctttttccacccttttcccttgggtctataagaatccttgtgttagatgtgtctcctgaagacagcagatatttggtttgtgacgattttattcattttgccaatctgtatcttttaatggagcacttagaccatctccattcaatgttagtattgtgagatactattccagtcataatgttgattgttacctagatactttcttttcttcactgtgttattgttttataagccgtgtgaattttatgttttcagaggtttctatcctggtgtgtatcaatcttttctttcaagatttagcactccttttagcatttcttgtaacactggtctagtattgacaaattccctcagcatttgcttgtctgagaaagacgttatttctccttcatttatgaaacttagttttgctggatacaaaattcttgcctgacagttattctgtttaagaagactaaaaaatgaccccaatctcttctggtttgtaaggtttctgctgagaagtctgctgttagtctgctaggttttccttaataggttacctgatgcttttgtctcgctgttcttagaattatttccttcacattgactttagataatctgatgactatgttctttggtgacgtcctttttgtaatgagtcttccaggacttctttgagcttcttttatttggatgtctaaatttttagcaaggacagggaagttttcctcaattattccctcaaataggttttccaaattttttgttttttcctctccctcaggaaaacctataattctttgtctgttttgcataatcccatatttcttggagactttgtttcttctaaatcttttttctttatttttgtctgattgggttaatttgaaagccttgtcttcaagctctgaaattgtttcttctacttaatctagtgtattattaacactttccactgcattttgtagtaccctaagtgtgactttcatttctggaagttctgattggttttcttttaaaaatctatctctttaaaaaaaattttttcattgatatcctaattttttttaatttgtgttggtttttacctttatcttgtatctccttgagtaaattaataatcaaccttttgaatttttatctggtgtttcaaagatttaatcttggtttgaatccactgctggagagttagtgtgttttttgggaggtgttacagaaccctgttttttcatattgccagaattatttttctggttccttctcatttgggtagactatttcttctcgttatttttgaatttatttttcatttaactggggtttttatttcttttattccccttgagggtatgactttaatgtttataatttattgtcacctagctttggctctaggtgctttcagtggtgaagactctgtataagtttcttggttatagagaatctttgtgtgatgtttttctcagatgctcgttgtagtagtgatatgcttggtattgagcaggttcagtgtttcctgtgggggttttcagtctggttcacagtataggctgccgcccactgcttctttcaaagggtctgtagttcctttcagtttttctgttaagttcctatgttgcttcttgaaaaaaaagttcagagcattaatttctacacactactttgtctaagtgggagaggcatgctagcaatacctccaatctgctatcttgggtaaggggagacttaatgccctcctttacctattttctataaagtccatttttgtctgatataaacatgaacacctctgatctctttgggttaccatttgcatggaatatcttttttccctccttttactttcagcccgagtatgtccttatatctaaagtgtcttgtagacagcatatagttggatcttgttcttttttaatccattcagccactgtatgtcttttgactggggaatttaatcaatttacatttaaagtaattactgataggtaagaacttactattatcatttaattgtgttctgtatggctagtagtaattttgtccccctttgcggctcttgctgcctttctatttcattgattcttctgtagtgacatgcttttctttctttctcattttttctggtgcatctaccatgggtatttcaccagagagctttatatttccatatcctttcatgttactgtttagtatccctttgtttcaacctgaaaaactccctttaacaattcttataaggcaggcataatggtaattaattcctcgccttttgtttatccagaaaggtctttatttattcttcacttttaaaagtcttgccatatatactattcttgattgtcagggatttttttccttcagcactctgtatagatgaggggacatcaaaactttcatggaaaattgaattaaaagataaaaattaaaaatatgaactttatttcttgtcataagctccaaaaagttccagtactcttgtaagtgattgtatcaaccatttagtacatcactaaaaaagtgggggtcctaggaacttagccatgtcaatgcagtcttttttacattattaagtgaagaaaaatggataccctttaaagatgtttttaaattagaagacaaaaagaagtcaaaaggaataaatcacaattgtaaggtggatgcctaatgattccccatggaaattatttaaaatttgtccttgtttgatgagaggaacgagcagaagcactgccatggcagagaacaactcgctgatgaagctttcccagacgtttttcttctaaagctttgggtttctcaaaacactctctaataaccagatgttattttcttttttatttttctttttgggacggaggcagatgttattttcttttgaccctccagaaagttaacaagcaaaatgccttgaatatctcataaaactattgccatgacttttgctcttcaccatgtgcccctcttggtagccattgctttgattgtgctttgtcttcaggactgtactggcaaaaccatgtttcatctgctgttacaattctttcgagaaatgctttaggatctcaatgccaattgtttgaatttttcactgaaagctcttgtgtgcagctaatcttagcacaacagttttggcacccattgagtggaaaatttgttcaactttgattttttagtcagaattgtgtaagctaaaccaactgagatgcctatggtgtttggctattgcttctgctgtgaattgttggccctcttcagttaggcacgaataagatgaattttttcctcataaattgatgtggatggtctgctgccatgggcctcatcttcatcgtcatctcgtcccttcttaaaatgaattatccatttggaagcagctgatttctttggtgtactattcccataaattttttgtaaagtatcaataatttcaccattcttccaccatgcttcaccataaatttggtatttgttcttgcctcagtaatagcagaatacatgttgctctggatagggactcttttcaaattgatgtcttacccaaatcagctggaatttattttagtgccaaaaaaaagtttgaaatccatgcatagtttttttttcataatacataccgtccacgaactttttgaagatccctcatataatctcattccactctgtcctgcgatgcttccactgagaaatgtgtgatattcttatggaaagtctctgtatataccacattgcctttctcctgttgcccttaagatattggtttttggaaagttgattagaatgtgtcttagtgtgaatttctttagtttcatcatgactgtagtcctttgagcttcttatatttggatatctatttcctttttcacatttggaaggttttggctattgtagtttgaaaaatattctgtccctcatttcctctatattcctcttctgaaattcatgtaatgcatatattgattcacttgatggtgccccataagtcccttaggctttcttcatttttcctttttctttttgttccactgactcaataatttcaaatgacctgtctttgagtttgctgattctttctcttgcttaataaagtctgctgttgatcccctataattttttttctcaaatcagttactgtattcttcagcttcagaattcctgtttagttatttagaattcctgtttggatctttacagtttccatctcttaattgatattctcattttattcacagtttcattgtatatgttttcttgtagtgcactaatttaaaatgttccttttaaactatttgtcaggtaattcatagatctccatttcttttgggtcagtttacggacagttattttgttcttctgattggaccatattttccctgtttgtgtgccttatattttgttgtaatttttgtatttgaataaacggtcacctcttccagtctttacagactggttttggatggaaaaagatcttcaccaatcagcccagctagagattctggcggtctctcaaaccttttacagagatgaattttttctgagcctatgtgtgtaatttcacaaccagacaaagttttctggtttctttttcaggagtctacagtctcttgcaccctctggtgtctgtttgcagtactacgggtattttggtactgccaccaaccgctgagctctcttgttctcagcagtccccaggcaaccaaggtatgcctattcctcatcagcactccaagtcaagcaaggcagaaaccagtcacttgagtagtctcaaaaagccagcacattggacataattccattttactctttttctcccaagggagaaaccagtcactggactttttttcctcatcattagctgtggtggcttggggaaggggccgactcagatgaaatgaaacagcttttcttacctgtttcaaaaccatggttcttggttttaaactggagttctgtgacttcataagtgatttctggccttctcataaaggctttattggaccacatattgttaagtcagtatttctgtaggggtagaagtctggtgcttcctattcctccatcttgctgactgcagacaggcttatttttgtaatctcataaagcattctctacatgaagaatttacagtaaggaagtttctttgatttagaacaaaggtatgaaatatcttaaacgtccatttccgcctctccctttctgattttttttttttttttttttgcatttaaagtatataaagacattgtactggacacacaatcttatataccatctcaccttcatctctgattccagcgaggctacagtaaacagttcggcataggtatcaacccactttggggtaacaatgtctcatctcaatcttacactaaacatacttctttattacttccctaggagcttgttagatatctatacgtctaagtcttaagtgtattaacacagaatcgcaggaaaggcaggccccagaaggcaacccttgactctcctcaaggagggaacagaagctgacagaccaatgcctctctttttaattccttaggtggacaatttagggatatagcttctgggcctcaccagaagtagtagtcatcctcagaagtaacaaactagatagtgcatcattgtattggctttgcctttttctatttgattcttcaattccctcatttcacttcttggtcttgtggggtggaggtacgtgacccaggctatgatgtacattaatcagggccttactctacgtgatctccttttgttttctgttaaaaaatacagatacgtttcctctcttccactagattatattccttttaaaggtaaagggcctcatttaattctgcagtcccataatatgcactcatgatttttgtccaatacatgcaacaatttcccattgtagatggcctcactagtcccaaatgatttaaaatgaaaaaaaaaaactttcacaagcttgaaagctaatcgtttatgcaaaacttttaaaatccagatccatttttataatgttttgttgctaaagcccagtttttagacttggtcaaatatgctctacttagataatgcatctcagatatccatttactgatagtaaatatatttttgaaggtaatctttctgtgtaggtaataagtgccaacaatgttttagtaaattatagatccctgaagaaaaacgctatagatctataacaatctcaggttttcttttcccatataaaatgttctaattaaaaaaaattccccccagattaaaataaacatttctttacaagattcctcctgcaacactcaagccaaacacacatttctctggcttgaagctaaatcattatatgaaataactaaaaaagataaaatcttaccaaaacattgcctttgctttaagtgatgcttttaacaaacaaaagaaaaagctcatgataaagggatcaactcagaacatagataatacaagatttagtggtcttctgcgcagaataagagaaatactgtgttagttctcaataatcaacaagcaattaaaacaattctgaaaatacttgaaatctggacagatacagatgtattttttattgaaattttaccctaaggcacaacattacattttcctgccctgcaactctagtggcttagatgctagatatcaatactggcacatgaagcttgatagctggacatattagcagaggaaaaggaaaatgtgacaaaaagatcctacttgaagacacataaaatctgttgttcacctagacaagtatgttaacaccaacaagtctcaactatgatttacactgtaatctctgctcaattaccatagaaaatcttaaattagctaagctctagcccacagaattcagggtgttgcaaatttgactgccaagatgttagaaaacaaagcttgtggttagctctctgacaagtacttgcttctccaaagccgagacactttaactatcctctctttctaccacatttcccatttgctgtgaatgctcaggtgtggtaaagatcaaggcaaatccctaccaaagctactcatgtatggagaaccaactcagcttctaacaccacgttcaaagtaccattgggtttgtattgtttactgtgcagaagacctggtatactggagctgaaagagattttaaggggcatctaatccaaaaccctgagaggctgtccaaggtggcgaagtcagtggcaagactgggtcatgaactcagggcacctaattcctaatcaacattttgtggggagaagtggtttatttccctctaactcaaaataactcaatgataattttagtgcagtgagcaagctaacataaaaggctattcttaattttgagaatggattatctcttatctgagaagatttgaaatcacatttaaacaagtatctagagatatattattctaagaacaagataattcagtgtcggcaatgaaataaactgaaattatattaaccttgacaaatttcgatttataaaactaatccagattagatacacatataattaacattaacctcgcttgaattaagttttgcgtatcctcattcaaaactccacactaatgtactatcactaacagtaaaacattctacatacggcctagattgagggtgaagacagatcatcttgcatatggagaactgctctgccttacttgggtaaggcagaactgtttggcacttcctaaggccaagcacgtgactttgctttaaagctccattccatgaggtcaatgccaggtccgctagcccaaaatgaacaaactttttaatccagatccatcatgggtcatttattctataaacacagtccagatattttcacagctctgggccagatgccacagaggaacagaatatgaatttgaaaaataccaactatttacagggcaccaattgtgtgccagccttacaaatgttatcataaccctacatgagacatattattattctgttttgtaaagggagaaactgagaaagcataaccaaagctagtagaaggcagagctttggaacacctgcattctcactgagaattctaacccacccgagcctgacaccaagctcctctgcatttcagcagggcactcaagaagcaatgtagatgtgtggtattatttctgaaggctctgttctgttccattggtctatatctacaaccatctggtctttgacaaacctggcaaaaacaagaaatggggaaaggattccctatttaataaatggtgctgggaaaactggctagccgtatgtagaaagctgaaaccggatcccttccttacaccttatacaaaaactaactcaagatggattaaagacttaaatgttagacctaaaaccataaaaaccctagaagaaaacctagacaatactattcaggacacaggcatgggcaaggacttcacgactaaaaacacaaaaagcaatggcaacaaaagccaaaattgacaaatgggatctaattaaactaaagagcttctgcacagcaaaagaaactaccatcagagtgaacaggtaacgtacagaataggagaaaatttttacaatctacccatctgacaaagggctaatatccagaatctacaaagaacttaaacaaatttacaggaaaaaatcaaccccatcaaaaagtgggccaagcatatgaacagacacttctcaaaagacatttatgcagccgacagacacatgaaaaaatgttcatcatcactggccatcagagaaatgcaaatcaaaaccacaaggagataccatctcacaccagttagaatggcaatcattaaaaagtcaggaaacaacaggtgctggggaggatgtggagaaataggaacgcttttaaaccgttggtggtactgtaaactagttcaaccattgtggaagacagtgtggtgattcctcaaggatctagaactagaaatgccatttgacccagcaatcccattactgggtatatacccaaaggattataaatcatgctgctataaagatacatgcacatgtatgtttattgtggcactattcacaatagcaaagacttggaaccaacccaaatgtccatcaatgatagactgaattaagaaaatgtggcacatatacaccatggaatactatgcagccataaaaaaggatgagttcatgtccttggtagggcatggatgaagcgggaaaccatcattctcagcaaactatcgcaaggacagaaaaccaaacaccgcatgttctcactcttaggtgggaattgaacaatgagaacacttggacacagggtggggaacatcacacactgggtcctgtcgtggggtggggggagcagggagggatagcattaggagatacacctaatgtaaatgatgagttaatgggtgcagcacaccaatatgacacatgtgatgagttaatgggtgcagcacaccaacatgacacatgtatacatatgtaacaaacctgcaggttgttcacatgtaccctagaagttaaagtataattaaaaaaaaaagaaagaaacaatgtaacctattcgggagggtggtttgtcatcctaaactcagctatgatacatctccacaacatacaaaagtctagaccttacaacaaccctaattggaaaactagtgtctagatctacttggaattccaaaaagaaatcagggctccaaatttaaagtgtttacagcttttttttttctctgtaaagtacagatcccaatgggcatctgtatgtcacgagttgttgctgagaagctgagatgaccgcacaggcataaatcaccaaagacaatgccccacacaaagtaagagataatacaaattggctgctgcttttgcaattaccatcattcttcagtactcagattcctcaaatttcttcctcagaatacagtcacgaagaaaaaaaaagccatgtaatcacattcgttattaggtagttcataactataaaaaatttttttcaaccaaatgtactattattcaaccacagaattctgaaaactgcttagaaatacagaaaacatttaatagattaaaatactgaatacaaagcagtaaatactataccagcaactacataaactctaattcaaggcagaaaaatgaaaatggttgttaggatggtgagattactgacgattatttttcttcttaaaaagcttcctcgtattgctttaaaaattttttattattattatattttaagttttagggtacatgtgcacaacgtgcaggttagttacatatgtatacatgtgccatgttggtgtgctgcacccattaactcattatttaacattaggtatatgtcctaatgctatccctcccccctccccccaccccacaacaggccccagtgtgtgatattccccttcctgtgtccacgtgttctcattgttcaattcccacctatgagtgagaacatgcggtgtttggttttttgtccttgcgatagtttgctgagaatgatggttttccgcttcatccgtgtccctacaaaggatatgaactgaccattttttatggctgcatagtattccatggtgtatatgtgccacattttcttaattcagtctatcattgttggacatttgggttggttccaagtctttgctattgtgaatagtgccgcaataaacacacatgtgcatgtatctttatagcagcatgatttataatcctttgggtatatacccagtaatgggattgctgggtcaaatggtatttctagttctagatccctgaggaatcgccacactgacttccacaatggttgaactagcttacagtcccaccaacagtgtaaaagtgttcctatttctccacatcctctccagcacctgttgtttcctgactttttaatgactgccattctaactggtgtgagatggtatctcattgtggttttgatttgcatttctctgatggccagtgatgatgagcattttttcatgtgtctgttggctgcaaaagtgtcttcttttgagaagtgtctgttcatatccttcgcccacttgttgatggggttgtttgattttttcttgtaaatttgttggagttcattgtaggttctggatattagccctttgggagatgagtagattgcaaaaattttttcccattctgtaggttgcctgttcactctgatggtagtttcttttgctgtgcagaagctctttagtttaattagatcccatttgtcaattttggcttttgttgccattgcttttggtgttttagacatgaagtccttgcccatgcctatgtcctgaatggtaatgcctaggttttcttctagggtttttatggttttaggtctaatatttaagtctttaatcaatcttgaattaatttttgatcaatcttgaattaaggtgtaaggaagggatccagtttcagctttctacatatggctagccagttttcccagcaccatttattaaatagggaatcctttccccattgcttgtttttctcaggtttgtcaaagatcagatggttgtagatatgcggcattatttctgagggctctgttctgttccattgatctatatctctgttttggtatcagtaccatgctgttttggttactgtagccttgtagtatagtttgaagtcaggtagcgtggtgcctccagctttgttcttttggcttaggattgacttggcaatgcgggctttttttggttccatatgaactttaaagtagtttttgccaattctgtgaagaaagtcattggtagcttgatggggatggcactgaatctataaattaccttgggcagtatggccattttcacaatattgagtcttcctacccatgagcatggaatgttcttccatttgtttgtatcctctttgatttcattgagcagtggtttgtagttctccttgaagaggtccttcacatcccttgtaagttggattcctaggtatttcattctctttgaagcaattgtgaatgggagttcactcatgatgtggctgtttgtctgttattggtgtataagaatgcttgtgatttttgcacattcattttgtatcctaagactttgctgaagttgtctatcagcttaaggagattttgggctgagatgatggggttttctagatatacaatcatgtcatctgcaaacagggataatttgacttcctcttttcctaattgaataccctttctttctttctcctgcctgattgccctggccagaacttccaacactatgttgaataggagtggtgagagagggcatccctgtcttgtgccagttttcaaagggaatgcttccagtttttgcccattcaatatgatactggctgtgggtttgtcatagatagctcttattattttgagatacgtcccatcaatacctaatttattgagagtttttagcatgaagctttgttgaattttgtcaaaggccttttctgcatctattgagataatcatatggtttttgtcgttggttctgtttatatgttggattacgtttattgatttgcatatgttaaaccagccttgaatcccagggatgaagccaacttgatcgtggtggataagctttttgatgtgctactggattcggtttgtcagtattttattgaggatttttgcatcgatgttcatcagggatattggtctaaaattcccttttttggttgtgctctgccaggctttggtatcaggatgatgctggcctcataaaatgagttagggaggattccctctttttctattgattggaatagtttcagaaggaatggtaccagctcctccttgtacctctggtagaattcagctgtgaatctatctggttctggactttttttggttggtaagctattaattattgcctcaatttcagagcctgttattggtctattcagagattcaacttcttcctggtttagtcttgggagggtgtatatgtcgaggaattaatccatttcttctagattttctagtttatttgcatagaggtgtttatagtattctctgatggtagtctgtagttctgtgggatcgatggtgatatcccctttatcattttttattgtgtccatttgattcttctctcttttcttctttattagtcttgctaacggtctatccattttgttggtcttttcaaaaaaccagctcctggattcactgattttttgaagggttttttgtgtctctatttccttcagttctcctctgatcttagctatttcttgccttctgctagcttttgaatgtgtttgctcgtttctctagttcttttaattgtgatgttagggtatcaattttagatctttcctgctttctcttgtgggcatttagtcctataaatttccctctacacactgctttgaatgtatcccagagattctggtatgttgtgtctttgttgtcgttggtttcaaagaacatgtttatttctgccttcatttcattatgtacccagtagtcattcaggagcaggttgttcagtttccaagtagttgagcggttttgagggagtttcttaatcctgagttctagtttgattgcactgtggtctgagagacagtttgttataatttctgttcttttacatttgctaaggagtgtattgctttaaaaatttctacaatgaaaagtgtgtttttaaattatttcataatatattacataggtatctattatgcctaacttaatgggagtctgcaggaaaaccaaatgcattgtgagcctactgtgcaatatgacaatattgccctccgcaagaatatatagatttgtgctcctcccccaagtcccttacaacaagccactataaacaacataccagttataaattatgttcccagactaaaatgcttcaagatggtttaataatgtggaaaaagtactagcttcaagggtaaaggaaatcaaagaaagaaaagagtctgattcttaacttcaatgatttcaccatcctctaaccaccttgcaatgtttctcaaagtgtgatcctgggaccatctccattagactcacaaaagattctttccaaaatgccaatcctgccaacaccactctcaaacctacaaagttggaatctgagagggaaggccaaagtgtactccctcaaaaaaaaaaaaaaaaaaaaaaaaaaaaaaaaaaaaaccccccctttccctggctgattttcatgcccacaacttttaaaaaatactgatccacaaacatgctaagcaggtaagataaaattcacttcaatttttcagcaaaaaaaggcaaaacggagatctaactttatattggtaattcaattgctttctaataatggactgtgggaaccgcaggtataaggagcagattaccctgcagatttgttgtctcttctgcctaacctgcaaaacttcccagaaaataattttgcaaaattgatcaggaaccttaaaatttccatgtcctttgctccccaaaatttcactaataaggtttttcctatgagaataataaaaaatgcataaaaggcttttaggcagaagtggttgggacagcgggctaaatatttatcatctgccatatcttgagtacctgctccgcacctggcacttgtggatacagtatttctaatcctcacaacctagaagatagatactttttatctccattttagagatgagaagccaaatgagttattaatttgtcccaggccacatggctaataatcaggatctgaatcccgggcagtttgagtagaaacactggactcattccactgtctagccacctaaaaatattctaaaatgttgtagtgtttaaacaaagtatactacaacaaaagaattatacagacaccggaaaccatgttcttcaagaacctttaatgaaacagaaaatacttatgattcaacgctaagtgaaaaagataggaggtatgatcccagtgtagaatttaagtcacagaagggtagggccagtaactcttttggtttcatctgcatccccaaagctcaacactgcacctgacatatggtacaaactcaaaatgcatggcaaaaataaattatgtgtgggcatattttcaaaagaccaggaaaaaaattcctaaaatatcatcagtggttattgctggattctggagttagggatgacttggtttttcttttttacttatgtttatactttcaagtattctatataggtttgtattacttttaaaatcgagggggaaaaaacagcaatggctaattttcaaatcctatgtttaatcacctttctatataagagatacagttaagctccagatcaactcaatatgcagactaatatgtggtttatcattctcactataacagggaaaccacctgatacctagaaagtgttatctttttatatgccagcatcataaatgggaacaagatttaatacttgttacaaatacaaacattttcatcatccacagctattagtagcctgataggtaggaaaaggatttacaaatgtatagcacccacaatgcttctatgatggttttgtgctctctggagactgccctagatggtagtacgataaggattagacattgaatttggtggcttttgcagcataacaagattttcttgccaagatcatccccacacaccaaaaccactataaattagcaataaaattgcgcctcattcctggtagtttattaaatatttcatataaaggaatatatgtggtcactattaccctatgtattttttaagtaagaacagtatcttaaaacgaactaagaatgagtcaactggtctattttattagctcactattttggacaatttcagacgacaaaacatgggatgataattctatcaaactgtctccaaaacggttctgaacaaattctggctttgttggccagattatacctaagtgaccaatctatgaaaagccaaaagggcgaggcatgaactacactgaacctgtcaattctaaaccaaatctgacatgtgtggacagtgggaggagggaggacagaaaagatatcttaagataataaaaagtgaaataagcatttttattgtaccatgtaattttctatggaaaaaaaaacatttgacatggagaaaacaatggagaatttttagagatagttccagtactcagtggtcctagattctgttcataaaaggagtaacaagatgagaagagctttagatgatcagagttggtttcctctttggtatttaggtttacttctggactatgccaagaaagaaattctagggagcctctcagaacctattctggttcaggggctgcctgatgaaaaaaaattataatttaaaaaaaggaaagaaagaaattctactgatatataatgttactgaataacataagttcctacagattatcagcacagtccaaagtctccaatacaggtaagctttgacttcagtcacaatttgcaattttgagtcctaatgctcctccactttgcccactgtgaggaaaatatggggtaaaacattcagcatccattctgacccccttcttctttgcctacttccactagtgaggctggaaaaagaagatacattcccagagtcttttgcagcaaaaggtggccaaagaagtacagacagaagttccaggagagagaattctttgtcacataaaaatgcaaaatctctaagagaaaataatttttcttcttccgcctttttcctgcataaaccagacacacctcaaaacacagccacagccacagtgcaaaaataaggcaaaaagccacaggctgaagatggtggaggcagggaagagggaagacacggggctcctgatgcccttgagcagctcttggagcctggactgcttagccccagacttctcattaggtgagaaggacaaacccctggcttgtttaagccactctgtgtcaggtttcctgttagtcgcagccaaatacattcttgcctgtaaaagtcattggtataacaaacctctctagctatgtatttatcaatgatcaacttcaccaaaaccctccaagtcttcatagagataagtgactgagagtgcttgctccatgcccgtgagcgtgaggttttactgcccctctcagtgcatcctcacggaactctacgagaagcaaagtgaggacctcctcaatccaagttagtctgaaagcagctcctgggctctttactgccaagctatacaacctctgatgtgttttttcacttaatctataaagcaattttaattgcaactatgctctctggatcaaataaattgtcataacaaacttttctaattttttgaggaagactttcactaaaacacatcaaacacacccccccccccccaacacacacatacacaaaggattcacatgcaattagaagaaaaaagaaaaaaagacttggcaagtatttgctttctagtgttttgaaatctttatccatcatgtgagacagtactgctgcatctgaactgatgtttattaagcaccatcaacctggcactgaactaagcatattacatacattctcacactcagcattcacaatatcaccgtaaagtaggactattattatccccattttacaggtgagcaaatgaaacatgttaacccaggcagagtattttcttcaaaaaaccttctttctacacaccaatgaatgactcaaattcagagcaacttacaaccagaagagagattaactgatttcgctgctagtctttagtaaaccatactagaaatgaatggctcaggaccagtcaaataatgaaaaatactcaaagcaagaacaatttacaactaaaaagggtgaaaagccctctcgtcctgagcaaaatctagaactccacactcatgtctaatggagctttacttagtatttacccacccacctttacaagtatactcaacacatggcaagctaccagggaggccaataataatatttagatagctgtgcatgttcattaatcgtaagataatttaagaccaaactaaagtttccaatatacttgattttcatgatcaatataagaaagtgcattttatacataatgatttactgtgaatattgttattagcttattcagcacttcctatgttgccagcactgggatgacttacatacacctttttcctcttcattttcaaaactacctcaggaggtaagtactaccattaactgccccatttgagaaatgaggtcgccaagtgatggattctcccaagctccctattaaaatgtagcatcaagattcaaatctagatttggcccacagccctgtgctattaatctctaagctcataaatgtatttgatttgtttttgctgtttattagccttgatcaagcattagctagaaaactctgtttatttaagctttactctttatcttcactttcagtactcccccattttcacacatttttggcttcatatttcttcccgctctcatgaaaaaagtctaaattattatctgttcatcaaatcattttaaaaatccactaaagtttgctgaattaaagagataacatagttgctgctcctactgttaatcaatgatgtacaacaacctctgtttcagtggctaactctgctactcaaccgagcagtagcaaatgaccccagttctgcctatcactgcaaaaatgcaacatggttcttaaagtctttggcagcagtatcataaaatcccaccagatgtcaatctcctttcatgaaaataggccattcctccccaccacaggtcccactttttaacacttaccattttctctactgaaagaagggattcccaaactttgaaaatacctatgcttctgaattttatatgggaaattttttttaaataataatttgaagtgctgtgttatatatgggaatttttaattttatagtacacatatatgtttttacaaagaaaaatactttaaaaaagaaaagtattaatataggaatcctgtgattgcctcagtactctggcaaacaccaagactgtatctctgattctcttgactcaattatttcttactttctcccagacttcctgctataacactctcctccctttcctccctgataactcagttgagttaatgtgagttatgatatgtaacttataactttgagttaatttaactaaaatttaattggcttacataaatcaatactattatttcacatgatgcatgaaatttacatttgaagatcagtattaaataaagaaattatataaggattttctttatcattaaaaatgctgtctatggtattcattccaagacttaccacacccatcaaaaacctaaacttgaaaataaatttccatttataaaactgtaaactaataaaactgataatcttcacttacagcaaaaacatcagatactctgcatggttgtttcgaagtagtaattagaccccaacctgccagtaaaaaaccatgaaaaaagagtgatatttccctacattgttggcctggtggtttttatctgcaacaattcttttaagttttaatgatcatctaagaatggtatttcatttatttgactactaccctattgcccatatattaacctcactgaatttttggtccattgcgtagaagaatttatctactaataaaaatacaactcattaaagattaacttgcccccaggacagtctctctggaaacaaattccaagcattataatcaccaatttgcactctgaatacttaaaggcagataatcttatttatcctgatttaaattggaaacctgtacctattttaagtcaattgtaaatagaaaaatagcacacccaaattcacaataattgaaaactcaaatacagactttacttacttggcacttttcaaataaaaagctttccacccaagaatatctaacaatattagaatgcttattgacttgatagacttacttctttagtttctattttacttctgcaattatgaacctgcaaaattattttgttccccaactatttattaagtatatactatatttcatacattgtggtaggcactggaaatccttttaatccatgatgcaatatttattattaataataacaacagatattcattaagttcttatcattgaccaaacactgtgggcaaatgttagcttgttaggcattatctctttcgattctcccaaaacctaaaaggtcctagtatcagctccattttacagatgggcaaactgaaggcaaagagaggcctagcaactttcctgagatcctacagagttttgaacccaggtattagtgatcccagtgctcacacttgtgttttggtcaacaactaaccacatacactacaatggtcccgtaagattataaagaagctgaaaaattcctatcgcctagtgatgtcatagccatagtaacataacacattacctttccaatgtttagatatatttagatacacaaataccactgtgccacaactgtctacagtattgggtatagtaacacgccttgtagcctagtaacattatttgtagcctaggagcaatagactataccatatagcttaggtagtaggtgtagcaggctacacaacctaggtttgtgtaactacactccatgatgtttgcacaatgaaaatgcctaaggacacatttctaacaaggtatcccagtcgtagtccttaagcatggactgcatgactgtatatcggttgttcaagagatgttaagactttctgtaaaagaaactattactgcaaagcaatttcaaaccgtctcagatcgtagtatcacatctattaatacaaaagagccttcaaattttcaaaaagtctcctcaaaatttcattttattcgaagtgaaaatgaattaaatcaaaaaaggaaattcacttctaaagctcaggttatacacttgaacttcccagaagctaacatcactgtccttacttgtttgtgcgcaggtgaaacagatcattctttcatatcactccaaactaatgtagaaaactgaaagctggttgaaaaggatgagtatgtgctactatcagttcattccaaacgatctcacaatatatgcctgacataaatttaatattttgttttataatcataaactaggcaaaaagaaccacagaacagacgaaataactgaaatgagttactgaaatgcaactggggctttaatttccaaatctatcttataacggtcttacttgaagagtttatcacagaagtaactgtcctcaaaagttacataatttgagaaaaaaagagagggaaggggagagacagagaaagacatgacacacattagggatgtttgtcaataaaaataagcaacaagggaggaaagcctgtagcacatccaaaaaacgtctgccaaacactcttgctatttgtttccaccaagttattgttttggaaaacatgttgttctctcttaaaataacctgcttaattgttctaaaaagccactgcatttccacagagggctaaatcattcccatactgcgatgcattgactgataaagtcaaagtaagttatgcataaagccacaaataacgtttgaaaaactccaaactcctccatgataaaagaacactagctactgaatgaatcttcaccagcgccctaagtgagactaacgcctggtcccgtacacgtattttaagaataacagtcattcaaactaactcatttctctctttggatgtgggaaatgagccacatcggtggctacaggtaggctagtaattatctgttttaagaaaggtcaaaatgaccttggacgttttgacgttcactccaacactcgtattataaatcagaatctgttttcggtccagtatggttgaagattttctacctgggaaagtcccaaagaaattaaagagttaaaaataattctaagttgtgaaagacaaagtcagacacccatagcataggaagatttttatggactgaatgtaactcaagatgtgttttataagcctgtcaagagatgaacactgtcctcaaacacagcagcactgcctccacactcccccctcgctttggctgctcaccccgatcctggccctccttgaccacaggggtgggggcgggagctcctgtcttaagccttgacatctgcagagcgtttcccaatagtgagacaaggcccctcagctggaggaagtggatactgacaaggggagagagtgaaacagacggagagagacagaactcgaggctgccagggaatggggagggtcacgcatactctgtgcggcccgagtggtccggatggcacagcccaggtgtccgggctaaagttggcatctccaaagtccagaacgcaacttgggcgcgccagtacaaactcggccttcggcttttctgaagccagtcaagttcgcacagggcccccagcgcctggaaatctgagaggcgtggaagggtggggagtcccgcgaagtctccagtccctgggtgtcctccggctccgcgggggagcgggcctggagctaaaccggccggccgtaggctggagtagcgggcgccggagcgcgcggtggggatgtccgaaaaggagttagaggctcagtcggagagtccgagaacacgagggatgcctaccttgtaacatggcctcaagtttcttcctgtccacgcggaagcgctcctcgctccactccgggctgtgcagggtcgccccggcgaccaagtcgtcctcggagccgggcactggggagtcggtgctgcgctcgctgttggagccggggtccgactgcgccgccaggtagccgggctctccctgggcggccatggtgggcgcgcagcgctcgggctcccgctgccgccgccgctctgcctgcgctgccgcctccgctcgccggccgggctcaactggctcccagcgccgcggcgctagctcgtccccctgcagccgccgacgccaccgccaacgccgccgccgccactgagcccccggcgcatcccagccccgggcgccgcccacgccacccgccaccccgggtcgcggccccggtccgggtccagtggctgcgccgccccccgccagcaacgcccgcgcggaatgagcgcgccgcgctgcccgcgcctccatccgcagggctcggcgccccctccccgcccgccgcccctacagccgcgcgctcattggcccggccagcccacggggagccgcggcgggcgggcggcccctggcgctcacacactcgcgcgcgcacacacacaccacgtacacactgccactttctgcacttacacgtataaatcctttccatacatgcactttcatagctcctcaaacacacacactcctgaacgcacatggagtatccacgtaattcctgtctacacacacacatcacacacactactacttttctgcacttacacatacaaatctcttccccctacatgctctcataatcctccaaacacacaaacacaaacacgccaagttcaagcacagcagagtcctgaacgcacactaagcgcatacacaattccgctgtttacatacataccctacaccctgaaactcacagccccagttggttccacaagctcgaacgtgaggaagaggaaaaagaaggcttggagaagaaatcatgcccgtctttcgcaggcatcgccatggacgtggctcgcatgtagttcatacctccaggaagggctcaaacccagacacctcgtctcctcccagcaaagtggcccgctgcacgagaggtggacaagaggcttactctttttattctgagaaagggaatttttttttttcttgaatggagtaaggaaggaattgttttctctgtgattctcaaggaatggactcagcagacttttttttttttttaagtagaaaaggggctcggagatcgctgtgttggcgagctggatccagctggcacgtgggcagggctgtcttgtcagggactgagggcttttctctgttttcaaggtcagtctctgacagatgacggccagtaacctctgagcctcactgccgagggccagcccacccacggcctctgtcaagcttggatatgaagcgcgggggaagaggagactcgctcgtactgggtgtgcccttggaactctgttttcccagttcacacagattcatagcctattattttatgacccaaagtacaaagacttgcggggaggaatgatggggatagcagtttgtcactgcgccacagaaggaggctgcctggctcacatgtaggaagagccatatcactggcacaggcctctggataatcatggaatatgctgaaggtaaatcaaaattatttcaggttcagctgcctagttaacaggaattgaccctgtgatgggtacagatgaggaaactgagaccgtgggaaataaagtaacttgactaaggttgtccagcagcagataatacagccaattaatcagacccaggtctgtgggtctttatataaagtcttacctttttgagcggagacccctcctgcccagagtcacctcctgaagaactgagagcatctgcacacttaactgctctgattcaccaccatgtgttccttttataaacttgttaattactgttaatttctatccaaggcactagtttcagcacccaaagggtttatgtaggagcattcccactgttttccatcagggacatttactgtgtttttctatcaacaaatatttattgggaccctactatgtacttggcactgttaagcccaaggaatagtaagcaaagacagacacatccctgtactccctcctggagctgaaattctaatgagaaggaatactgaccaaaaaataaatcacaaatataaaatcatgcccgcagtaagcattacaaacaagagactcaagatatgagaaaacctatgatagagtaattggattcagtcagagaggtcagtgaaggcttctcgaaacagtgactctaactcagaacagacgttggaagagaagttaactaggcaagggaaggaagagccatccctgcaaatgatcatctgatcatagtaacatccctgaaggtagatactacaattatcctcattttagagttgaggaaactgaggcacaaaaggtaaaatgacttgctcaaggttgcacgactaagttgaagaataagaatttgaacccaggcagtctcttgaaaattaggcttcaggtgctttatgcttagccaataagttatattggctctcaataagattagcacaagtaaagacactgtagcagaagggggcagtatgcattcccccattggatgaactaaaagaaggccagcgtagctggtacaaggaaacaaggaattaggactcactggggcaggagttataagtaagagggggcatatgtaagcagcataggtcaaattaaggagtttttgtctttatccttagaataaaaggaaatcatatagaggctgtaagtaaagaaagatgtgcttagatttgcattttcaaaagttgactatggctctagtgtggagaacagactgagggacaaggatagatagaagcagttggaccaattaagagactatatgggaagtttagataataaatgctgctagcttacataggtggtgaagatgagagacatgagaggatttgagaaatatttaaacagtaagtatcaccaagtagattggtgatgaattagaaatagtgtgatgggaagagaaatgttgagaatatctccagggttctggctaacataataagagagagataggtgtcattaactgaaactgggaatattgaaagaaaatcacaatggaagaaagttcatgaagttgaattcggcattttgagtttgaaatgatgttgagatctccaagaagagatgttgtgttagcaattgaataggtctggaattcagtaaaggaatcttggctagagattaaaatgtgttacttgtttataggtaacaattctagccatctacctgggtcagactgtctagggaaaaagaagagacttagaagaaaagggaaccaaggaatgtgactttttaaaattctgacagtggtcaagtagaggacagtgtaatgtgaaaggatatagaagcagcagtgaaagaagaatgaagaaacaaagctgtgtcatgtaaactcagaaaaagactattacaaaaaggaaagtgtgatcatctttgtttactaagggaagtcaacattttttttatgagattgctgagaccttggcaagaaagccataatggagtggttgaggactgggtatagctaatgaaatgagaagtaacaacaactctttggaaaaggtttggctgagaaagggaggaaggagcaatagctgaaggataaagtgggcattggttgtttggtagtttggttggttagatggttgatttaatggtttgccaggtttgagcatgtttaaaagtgactggaaaagattcaggtggcagaaattgagtattcaacaaaaaggagaagaattaatattatcaggttttgagagcatgaacagaatagattacaagagataataagaggacaaatagctcatcagaaagtaaacaagataggtacaaatataggtcagtttgtaggttgcatttttacaacaggaaggaattcccatatgatggattgtattttcccaaaagagtaaaagtcaaggttatctatgaagagtaggagggaaagagagcagtcataggtttgaagagagtagggtttgcttttggtagttgagaggtttttatatagcctttgcatctgtaaaaggatgagttggcactgttgagaggccagttgatgttggtaatcataactttataaaattataattataatcataaatttataatttgtcctatgactttctccaacagtactcagcttcttgaatgcaggcacagagaaaacacaggactcctgccaaatgaatgcagcatcaagagccaaatggcaatgcagcaatgcccagtggaaaataatttccatggtagaagtttataccccgcaaaactatcaaccaaacataaggctaaaatccattctcaaaaaaaaaaaaaagttttatttatttatgccctgtctgaggtagctactgaagattgcttgccaccgaaacaagattaaatcaagataaggagaaaatgtagaatatagaaaacaagcaagctagcacatgatagaggcaaaagagttcctcaagatgataatgaaaagagaactcaaattggagtaggtcagaaaactcagggttgagatttcttctagattaaatggaattcttggaatggaagaacatagaggatactgagacagctcatgaagactctgtggttaaattagtaatcagttcatagaaaactgtggtaccaaaaagaagacaattattaactccaagtataacaaaacatgcagaaaaattcagaataatcagagtatgcaacgtggctgagtcgtaactagcatttgtttagttgtaataatgtaaaccatgcatattgatctaacctaaattatgacatatctggaataggaatttgagggattgggaaatgtgcctgtgtgtagtggaggctttgtgtaaggggaggaagtggtgaaaaaaaatgaacctcatctgctttaaggaaacatcaatagataatagctaaaatgtttcaaaaatcaggaggaagaaatgtaagcatattatttggagacacagtggcaaaagtaatatcaagctaaacgttttggaagtcattgctgtaggaaatgggaaatggggggaaggcatacagtacttctggtttttatacaagtcttctagaacaatttgatgggtgtataactttaattttggaaatgcaaatgaagtaatacatgcttattacaccattattaataatgataaatatcattatcattaatgaataataaataaatagcagaaccttgaattcatgacttctgagtcaggtgctctttctacaaaaatcaaaccagaattagaatatttaccaatctttttgtttttatagagcatacatatatatatctgtttgtctttatctttccacttcattcaagaaaataatacttttcaatccattcgaagtctaggaacagatcagatgccaagtaatcaattgtatagattttctttaatggagtaaggctctcaaacaaaaaaatcactgagaaaatttaaataactaagatcacagcaaatcttcaagttcacaaaatatgaaaacccaaaagagatttttagcaaaacaagattagttatctgacatctaccttagatgtctaaccttaatcagtggtcatctgacagaaaaactcctcaggatacacttcaaagcaagatggtttggtgttctttcccaagcactcttcatttccctgaatttgtttcttccaaggctacctacaaaaatattgatcttgaatttttgtatttttgtaatactttcagaagcttatattaaaactgcttttctatttgaatttaaaaccttaacattacaattatgtttgaaaaatctcaacatatgtccagatattaatcaattaaatggcttacaaagctctcaggcccatttgtctctcccacctcctctttttgcatttcatatttcaacagttccaaactatttgtaatttctggtctagtcctgtcttttcatcttgagctctttgcacacagtattcctccagcttggaatattctctctcattttttcccctagccttcacaaacacccagccaccaggctgatttaggttctctagatcttttgtctccagtgaatattgtacttattcctattaaagcaattatctttacatttattatctctgtcattatcatcatcctcatccttatcattatcatcattctatgtctgatgtcccagttcctgaaggcaggaagcatggcttttcattactgtgtctctagcacccagcagttgcctagtatatgttgacaagcttttaactgtgcacctggaaacattagaaattaatttgtgatacattataattgggatgattagataaccatatactaacttagttgaggaagaacaggaaaagaagagttaaaactccaatattataattaaaagcagctgataggtaagaacattttctcctcagtttgcagctaagtaaacaggtccagagaaatgagacaaattgattagagtgccacagtacttgaaataaactttgaatcatcaacgttgaatctgcagttattggtccagttccttgacttacacagatcgggaaactgagacccaaagaccgaaataaaaaataaaatcttgcaaatataagcttaaaatttatgaaaaagctgatattcagcacagtatcacccacagaaacaattcatttcatctcaactttatttttttcattttaacttttaactgaaggtttctgggaagaaatctacatagccatgatatgatgcagtatgttttggatatcactttactcttaagtgaatactctaaaatcatataaataaattttccctgcaatgtcaagttaaaacagaagcaaaatataagatattctattttaatgaccttggagtttgttctagaagaaggcttatttgaaataagcataagtcaaattaataaaggaaggtgaacctaccatgtgtaattcaagcatttcttcagactaataataaggactaacacttactgagcatttataatttgctggacactatgagttgtctcatttggttgtcaccacaatcttttgaagttggtacaactcttgtctccattttagagaagagaagagctaaggccttgagaggataacttgcctgaagacctgcagtatggtaatggttctaagtcaaacacagagacatctgaaagagacaacattctttttttttatattatactttaagttttagggtacatgtgcacaacgtgaaggtttgttacatatgtatacatgtgccatgttggtgtgctgcacccattaactcatcatttagcattaggtatatctcctaatgctatccctcccccctccgaagctggaaaccatcattctcagcaaactatcacaaggacaaaaaaccaaacaccacatgttctcactcataggtgggaactgaacaatgagaacacatgcacacaggaagagacaacattcgtaaacctggaaccatctgattacatgtaggtagtgtaaaatgttagaggtagaaggaacctaaggctcatggattcacgtagttttcacatttaaaaaatagaaactgtctttcaaattaactctaatgcagaaagccgttacacaaaactagtaacagtggctctggttgaagaaggatggggaattctcactagctcatcttctccttcccataatctcagggtttcaaaggggctcaaactgctgatctcattccactctctttctctttctctttctctctttctctctctctctgtctgtcacacacacacacacacacacacacacacacagacacacacacacatatatttatccctgggtacaaatgaggcatatagagacagtgacttattcaaattacacagctcaaagcatcaagtcatgttcaggtttgtgttgctttcccattaaaagaggaggggttttgtgttttccagaaggcaagggcaagaaaatttagataacagagggggttcttgaattctcttactatttcaataaaataagcttctgattaaaaatattgtgaaaagtgaaacattttcattgaggtcttcagcacttcaatgctgaaaagtaataatagaggaatatttgggtcatctaaaagaaaataaaatggatgaatatggaagaagaaagttgaaaagcaggcagaagaataaaagaaggaaatgaacactttccagtcacttatttgaattctaacattgcctaacatagaactctgccaaaaagagggttaaaagacaacaatactacaatgttgaaattaccacccatggagatatttgagccccccacccccccatagctctttcagttgtccagatttcaaggtacatgttaattgtgcttttgatctacagcagcagcattttaccctgtcttttacttctggactaacactcacatgtaaatttattctcatgaccccctgggactgagaaagatggaatgtttttgtaaaagacaacagagtaagcatgtgcaaagttgtacctccctgcattatttatttatttatttatttgatgtactgacagtctgctggcaatgtgatttttgggtctagccagaaacaaagactacaaagccatacaagcatccaacccacaaggatttgagaactggctctgtttctaacaccacactcagttacaaggtaaattccaccaatgccacttgtgtgctaaatctcacatcaaatgagaaaaagattccagaaattagggccaagggagccttgagagtgagccttcctgggcaacttgtgtgggaagaatgggtcataacaggaagagagtgggtcatcaaaggaaggagtcggaccaaaatccacagaaatcccagtgggcaaatatatggcatgcactccaccacacccccaacctcctcttatggctgacattactagctgatcacagctctcttccactccagctcaggaaatgcttctcaataagcagtccaaacagccaaaacaaatcatttggagttggctctcaatatgaaacttcattgccatgttggatcctgagctgtggttaagggactggaagatgaacagtcattcaactggacacaggctgttgacccttcttttcagggcaggtgagcctcagagcaaaggaaataaatatcctggtcagctgttcccttcaagattcttatgtttttgtacagctaaaatgaataggaatcaaattgaagctactccaggtccacaatgtggtagtgagctagggccatgtagagctgtcaatcggttctaaactggatattagaagacctgaattttaatcttcattctttcactaattgtgtaactttagaccaggctcttaattttgttgggtctaatttcccatctgtaaaaattgggaaaaggttgatttggactatgtgaatttttaagttccttctaaccctaaatttccatgactcaaagaaattgcctacttggaaaataatacctcatttcagcaacaggttgtttctggttagaaaaggttctttcaaagaagaacaaatagaatcaaagaagaactgaaagactatcaaattcaacgtggtggaaatagtagcttataaaagtgcaggctaatcaaagtcttcattgcacagagataaagaatacagaccctggaatcagatcccctgagttccaggccaactgagccactttatttatatgatctgtgtatttgttatctctttccccataacaaattacctgcaagaattcacagtttaaaatgacaaacatttattatctgtggggttttatgggtcaggaatacaggtacagcttagctgggtgccactggctcaagatctctaacaagactacaatcaaggtgtcatattgaataagagctgtgatcttattcaaagactcagctgagagagggtccattttcaagccacttgcttggttgctggtaggattcagttccttataggctcttggactgaaagcctcagtaccttgctgactgttggccgaaagcctccttcaattccttctacctgagtctctccatagagcaacacacagcatagcagctggcttccatcagagtgagctggcaagaaagcaagagagagtgagtacccaacttgcattctttttgtgaactaatctcagaagtgacataacatacactttccatactctactcattagaagtaagtaactgggtacagcccacactggaggggaagggattacacaaggctgtgaatacaaggaggcaagaattattggtgccattttagaatctgcttactccaaactggaaccaattattttacttctctaaacctcagtttatttttaaatgggtataaaatagctatatccaaaagttcttgtaaagattaacgaacattttatgaaacatttaatccattcagcactcaacaatggttattgaagcaagcactcaataatggttattatttttaataactgttttgtgcttaactagaaaaattaagaaatctgctcgaggaaagaagacatattcatatacctaaaaagaaaaataatggaaggtggcggtaggtttggcagtgtattttatgaaaatccctgaatcctggcccattctctcaaaaaaacagacagaacgattattaggttgatgtaaaaataattgcagtttttgacacttacttttaatggcaaaaacagcaattacttttgtaccaacctaatagattgcaaaaccaaaaacacatagacaatatacataagaaaattagacaactaggtatctgtacaaattccggaatagaagctagtggtgacagcatccaggagaatcccaaatttgccatcagatattcattggaaagcacaaaaaactaatctgacaacagcggctgaaaataggtgggagtcctgcaggacccaatttgtaggtaagtgcagtggttgacaataagttctgactgttgttgctgaaacaatctggaccctgtgaacactcaaaactaaaaggccaaagctctcttctgggtcaaatctttattgaggagaaacttctggcaataggataaaatcaaggaggataaagaaataggggcaaaagtaggagaaggtcaagacacaagaggaagaaggggagaagcaaatcttagaagcataggcccatcttgttttatttctttggtaaagaaatctacttttacttaaaaatgagcaacagaaatggattgaggttgaattatgaaaaaaagggaacaagaaattgaataatggaggagatatccctagagagaataaaaacatgacagaaaggcatgccctccaaacagattaaaattgtaacttaaatttccaaacaaataaaaagacattttttaatgatagaagctataaaagaataaataagtcaggattggatagtctgatctgagtggaaagtatgaagatttgaaagaaaggataaagaattctttctcaggaaagaattaaactagtttaaattaataaattaacactaaattggaagaaacaaaagagcaaataaacacaatggatactgtcttaagtaaaagatggaaagaggaaaaatattttcaatgaaaaggaaattaaagatttttttaaaagatttgagagaaaatagtagatacagaacatgggagtggggatgcttctgtataatggtagtccctgacaaagaaaatcaaagcaatgggacagagcaaacactaaaaactgtaacttaagaaaaatttctattcaggaggctgaggtgtgatgatcacttaagcccaggaggctgagactgcagtgagctctgatcgtgccgttgcactccagcctgggtgacagagtgagaccctgtctcaccaaaaaaaaagaacaaaactttaatgaaataaaagatgacataaatctatatactaggaaaatcaacccagaatagccaaccctgaatcatgttccagtcaaaagtattgtattttaaataaaaagaggacttatttgggctaccaggcaagaagatcaactcacttataaggaaaaataataagactgtcattagcttttcagcagcaaaacttatgccagaagacacagaaataatacacttaagttattcgagaggaagaaaactaagatgtgcaagaaagaaaataggaaaacaaaatttacaaaaattagctgggcatagtggtgcatgcctgtaaccccagctactcaggaggctgaggcacaagaatcacttgaacctggaaggtggaggttgcagtgagccaagactgcaccactgcacttcagcctgggtgacagagcgagaccctgtctccataaaaaaaagaaaagaaaagaaaaaagttttaattttgatgatatccagtttatctgtttgttttgttgcttgtccttttggtgtcatatctgagcccattgtaaaacctacgtttatgaagatttacctcctgtgttttcttctaagtatagttttagctctttgatggatgtctgtaatgcatttcaagttaatgtttgtgtatggtgtgagataggtgtccagcttcattctttcatttgtggatatctgttgtcctagcaccatttgttgaaaagattattctttactgaattatcctgacacccttgtgaaaaatcaattgatcacagatatatgtgtttacatctgaagtctcaattccattacattgatttatatgtcatctttattgccagtatcacactgtctcaattcctgtagtttgtagtaagttttgtaattggaaatatgagatctccaactttttttgaagttattttggctattctggatctcttttattttcatatgaattttaggatcagcttatcaatgtctttaaagaacccagctgggttttgatagggattatgttggatctgtagttaaagttggtgcttttgtatactagcttctagtattctgtgtcatcaacggcatcttcatattaacttgcatatggcagattataaattttctctgtacaaaatattgaagcatgattgcgggctaacctaccagtgagaggggctattatgcaactaatagtatttcatatttgttgaaaggcaggagaaacagcacattcaattacctcatgttgggatggagagaattaggttgattcaagagatatttaagaggttgactccacaggacttgataattgatagagtgtgagagacaaggcagaaaaagatagaaaagattatgtttacatttctttgagcagccaagatggggaatgttgaagaaggagctgaattccttcgagttgatcatttctctgcctatacctgtagatttctggtccctctaggctattgtatccagggctcaagaggtaggacaaggccaagatttaggatgcaggcatgtacacaaaaatatgttaaagctggaagagttgatagagttactacattaggaatagccaaggtttcatttgtgtagagacaaacataagagctctgaatgcatccacagaaatcagagcttacatccaaggacatcaatgctacgggagagaaggatgaaacatcagtactgtgaggatagacaacctgagatatcaatgagggcagaagttaggctggggtctccagaatcagatgttcaactgacagcaagtgtgaaggaggactttgtcagggagaactgggatcagttttcagaaccaggagagtagaatacataacgtcatctacctggcatctgaagttaatcaaaactagtgtttatcaaagaaagttaaaaaaagaatcatctgcaaaacatgtaaaatggaaattcctggatatctctttcagcaggtcaacaagaagctcaagtgattctgccacaaatggaatattgatcgtaatttaagaaacactgatgaaactatcaaaaagaccaatttcatgatgaatcagcaggctactaggaaatatgtcctctgttgacgtctaggacaaatcttaatgaatgaatggagactggggttatctaccaggaggagagctgttaccggaaagaggggtcttgatccagaccccaagagaggcttgaatcttgcacaggaaagaattcaaggcaaatggcaaagtgcagtgagaaaggatatttattgaaagctacttaattacagagtagggcgtcctcagaaagcaagaggaggaatggactgtctttaagtttttcttatatagggatcttgtctatgtaaagactaaactaagctgtgcctgcaggtggatggacagatagcatgacaaaatttagtactttatcaatttaaagaaatctatccttgacatcttagtgtgtaagtacatcaaagcataactataattatcttgaaagcatatattattatgggtgttgggacacctggactttctgttgtagaaatttctccttgccggtgtctttcaactctctccttagctgtaaacatagtcatgacctagtcaggactattgatcaagaccaggaaggaatatgccttgtcagtattaagatgaagttgattttaaaatggtgtcactctggatctcctagactcctgcttccctaacacagtcacacgagataaacctttggccagtcacgtcctgtcatcctctaaatcagggattcttgaactggttagaagggggaagggcagacaagtttgcttctcagaaaaattggcattattctgataaatatatgattgtcatgactggggagggtactactggcatctagtaggtagaggacaaggatgctgctacacatacaatgtgcagagtcacccccatagcaaagaattgtccagtcccaaacatcagtcttgctgctgttgagaatacctgctctatatcctgaactaacataggatcttgtaataaagagaagagtaattccttgccagattgaagagactggctaaggtagttctaactcattttctttggggttgctacagtcagcaatatccacaccactactgaaaatgttttggaaagagaaggattagtgagaagggtatgcaatcagacaggaaagctccaggaactcccctgaagtcttttccatgaagactgatccatgacaacagctgtgtgcatggtattagaaatccctgtggaaagtgaccaataaagagatgtcgtatttgtataacagtttagttcacaaagcactcgtacattgtttagctttttctttgccttgggaggtaaccaggtagtattagtttcctgtggctgctgtaacaaataaccagaaatttggtgacttcaaacaacagaaatttattttttagcagttctaaaggtcagaagtcagcttggtgcagtggctcatgcctataatcctaacactttgggaggctgaagcaggaggatcatttgagcccaggaaattgacaacagcctaggcaacatggcaagactttgtctgtactaaaaaattagccaggtatggttgtgcatgcctgtagtcccagctacttgggagacagaggcagccagatcacttgagcccaggagtttgaggctactatgatcatgccactgcactccaggctggatgacagagcaagaccctgtctaccaaatatcgttttaattttttaaaaaagcacatttccaggactcttttcaaaccacttgaatctgagtcttatggtgggagatggaaagaaactgttgagaatctatatattatcatgttttccagaaggcccagcattattcaaaaatcactattctaaattcttagtccaacataacatatctcaacatctagatataatccctttctctaaagccaggtcttgctagttggagctcaagttgtaatggaatataattagtacctgtaatatgtctttcattaaaataataaggtatcaaattacatacttcttttttattaaaaaggaaaattaaatcctttgatattttctttttgaaaatcaataggaaaactccaagacccatctttcaatacatgctcaaggaaatcgttcaaaaatccacactacccaaatccaacattatttgtgattgaatttcttctttaaatatctttcagttactgccacattttaattcctagctaaaattctaccaacagtcacacagttcaatattatctggttacagcgggtacttggtgaaaacaaatggaatctggatttaagtcctatattaaaattgcttttgcatagtataatttgcattttataaggccaaaggcaaaatggctaaaataacattcaacaggagcctgtgattggctaaactgaagaggaaatgatacattacaaaatctcaaagccagacataagcttagcctgtctttgattgtttttttttcaatgccaagaaattgagtacagtaaattgctcaaaccaacaatataaaaatttgctcttcttggcaaagatcttcatatttctgaatgttttcttctttcttttggctttgatatccagtagttttgttcttactcttaaatggaggcaatatctatgacatttccacatacaatatctgaacctcaaaaaaagggagggtgtattagtctgttttcacactgctgattaaaacatacccaagactgggcacaaaagaaagaggtttaattggcattagagttccacatggctggggaggcctcacaatcatggcagaaggcaaggaggagcaggtcacatcttatgtggatggcagcaggcaaagagagagcttgtgcagggcaactcccatttttaaaaccatcagatctcatgagacccattcactatcacaagaaaagcatgggaaagactcgccctcacaattcaatcatctcccaccgggttcctcctacaatatgtgggaattatgggagttacaaggtgagatttgggtggggacacagaaccaaaccatatcagaggtagtggaaagaagaatcatcagtggaggctatttatgtatgcatactccctacttggtagaaattttctcatttttaagactcaacaagatgcacttcctcagtggagactttcctaccaattcctatctcaaaggcataattaaccacttccctaatgtattaacgatatgtctacctgattgtatcatggcccctctgacaatttagttattgtatacatacccatcttcatctatcagatcacacatccctttagagcaaggtctatcccatttatctttatctttatatccccagcacttaacaaagttggcacactgaaggcactaaataaagtgaatgaattaatgttctccttgccaacaaagctgaataaaatgtgaaaataaaaaacaatcaagaattctgctcaagtacaaaatatagggatagcttggagatattgggggtttggttccagagcacctcaataaagcgaatgtcacaataaagtgagtcacacacattttttggtttcccagtgcatacagaagttgtgcctacactatactgtagtatattaagtgtgaagtggcattcagttttgtaaaatttacataccctagttaaaaaatcctttattgccaaaaaatgctaatgatcatctgagcctttagtgagtcccaatctctttgcaggtggagggtcttacctcagtgttaatggctgctgactgatcagggtggtggttgctacaagttggggtggctgtgggaatttctgaaaataagacaacaatgaagtttactgcattgactgactcttcctttcgggaaatatttttatgtggcatgtgatattgtttgatagcattttaccgatagaacttctttaaaaattggaatcagtcttctcaaatcctactgctactttatcaagtaagtttatgtaatattcttaatttttgttgttatttcaacaatgttcacagaatcttcaacaggaataaatttcatctcatgaaaccacttcatttgctcatccataagaagcatctcctcatttgttcaagttttatcacgagactgcaacaattcagtcacatcttcaggctccacttctaattctagttctcttgctgtttccaccatatctgctcctctgctaaagtcttgaacttctcaaagtcatccataagggttggaatcaatttcttccaaattcctgttagtgttgatatttttaccttctctcatgaatcacgaatattcctaacagcatctagaatggcaaatcctttccagaaggctttcaacttactttgcccagcttcatcagaggaattacaatctatggcaactagccctacaaaatgtatttcttaagtgttaaaacttgaaagtcaaaattactcattgatccatggactacagaatgaatgttgtttgcagtcatgaaaacattattaatctctttgtatatctccatcagtactcttgagtgaccaggtgccatcttcaatgtacaataatattttgaaaggaatctttttttctgagtagtaggtctgatatggtttggatttgtgtccttacctaatgtcatgtcgaattgtaatccccagtgttagaagaggggcctggtgggaggtgattggatcatgggggcagatttccctcttgctctccttgtaataggagtgagttctcatgagatctaattgtttaaaagtgtgtagcatctcccccttctctctcttcttcctgctcctgccacgtaagacatgcctgcttccccttctaccaggattgaaagtttcctgaggcctcccctgccatgtttcgtgtatagcctgtggaactgtgaacccattaaacctcttttctttataaattacccagtttcaggcatttctttatatcagtatgagaagggactagtccaaggtctcaactgtgggcttaaaatattcagtaaaccatactagagacagatgtgctgtcatgcaggctttattgttccatttatacagcacaggcagagtagattctgcataattcttaagggccctgggattagtaaatgagcattggcttcaactttaagtcatcagctgcattagcctctaacaagagagactgcctatcccttgaaactttgaagccacgcaccaacttctcttctctagctaggaaagtcatagatggcatatacttccaatagaagactgttttatctacattgaaaatctctttagtatagtcacattcaccaatgattttagctggatcttctggatcactggctgcagcttctacatcagcacttgctgtttcatcttgcatttttatgttacagagacagcttctttccttaaacctcatcaaccaacctctgctagcttcaaactttcttctgcagcttcctcacctctcccagcctttaaagatttgaagagagttagggccttaactctgtattaggctttgggttaagagaatgttgtggctggtgtggtcttatatccagaccactgatactttctccctatcagcaattaggctatcttgcttccttatcatttgtactttcactagagtagcacttttaatttccttcaagaacgttttctttgcattcacaacttggctaactgtttggtgtaggaggcctcgctttaggcctatcctagctgttgacacgaaatagctaagcttagctatttctagcttttgatttaaagtgagagacatacgactattccttcaacttgaacatttagaggccattgaggggttactaattagcctaatttcaatattgttgtattgcagggaacagggacacccaaggagagggagagaaaaggaacaatcagtaagcagagcagtgaaaacacacacacaacattcactgattaagctctctgtcttatatggctgcagtttgtggtgctccataacaatcacgatagtcacatcaaacattactgatcacagatcatcacaacagatgtaacaataatgaaatattatgagatttcccaaaacgtgacacagagacaagaagtgagcacatgctgggggaaaaatggtgccgatagactagctcagcacagggttgccacaaatcttcaatttttaaaaaatgtgttatctttgatgtgcaaaaaataaagaacaataaaacaaagtatgcctgtaaccaatagaatttttatcttattttttcttttctcttattttttcaaaaccatattatttttttcagggttttaatatcattattttgacagtctttaaaaggagaggcacttcaagaaaggaatcaaataacagaagcagaaaaagagaaataggcctcgttgtatggtgcctgttcacattttgcagccatttactatcatcttactgctggttctaaatatgtccagtggaatgcagagttagagtaagtgttcaaattattaaatcaaataatgtgaccttttcccaattgctttagaaatattggatttacatattaagtccttcaattttaagttatttttcaaaaagatttttaaaataactttggaaataacttctctttgtctatgacaaatcacctgaatttacttattaagtatagatcagtggataattcagttaccatttggaaaggaatcttttattttgagcagcagatctcaacagtgagcttaaaaccacgctgtaaacgaatgtgctgttgtccaggctttgatgttccatttacatagcatatcataaacttatgcttacttagacaacttgtctttttcataggcttctttgcttgtggttttgaataacttataaccagagaaacaaaaatgtccaggtctctcttagcatcctgtgagtacaaaatgggaattgcatttatatccaagcagactagtgctggattaagctcttgactctcagctacaagccacccttttatatactgggactatgatactgggactggggctttgcaaatgccatttctcttttgtgagagcagcttctgttaggttctataaattgattcaatagagagagacaggaagattagaggaggaagaagggacttgctcttttccttgtgcttcccattcttgtcattgctgcccagcaatgtcctttcaacccagtgacaaagtctacttctggtttcccacttattccatcactgccagaaccagcctcatcacatgccctcagaagatggtaccaccaccgctgggaggttttattcccagcttcacaggacccccccaagcttgcaggttttaataatctacctctttcctttgttcccccaatcatgggtggcataattgctctctgaatgtatctatatgtattaccataatgttccctttttgtcatactgtttgatcaatttcatttattaaattctttcttttaaaaataactagtgtggtttttgttctcataactggaccctggtgccttgtttgatttgtcaatgtataaatcatacatagggatagaagaatgctggtccagctttagcaaactataatagcaaatggggaccatatttatagttgggagaattgaggggttttatctgtaaaaaaaaaaatactgtgtgtgtgtgtgataacatgagatctaccaccttaacaaaatttctcgtgacaatacagtattgtcattgatgggtacaaagttgtacagcagatctctagaacttattcatcttgacttaactgaaacctgatgcccattgattagtaacttcccatttccccctcctgccagcccctggcaaccaccatcccactctgattctacaaatttgactattttatgtacctcacataagtagaaacatgcagtaattatatttctgtgacttattctgtgacttattctgtgacttagcttaatgtcccctgggttcatccacgtagtcatatattgtagaatttcctttattactttgtctgaatcatactttattctatctatataccatattttctttaaacatttatctgacaatgaatatttaggttgcttccacatctattataaatagtcctgaaatcaacatgggagtgctaatatctcttcaagatcccaattttaattattttggatgactattcagaagtgggattgctggatcatatgctagctccatttttacttttttgaagaatttccacactgttttccatagcaactgtaccatttgcatacccacaaacagcatacaagggttttaatttctccacatcctcacaaacattagttgtcttttttatatatgtaatagccatcctgactggtgtaaagcgatatctcattctggttttgatgtgaattcctctaatgattagtgacagtgagcatttttccatataactgttagctatttgcatgtcttctttggagaaatgtctattcaagtccttagtctattttttaatcgggtaattagatttttttgctattaacttataggagttccttattttttttagagtaaccccttatcagatatttgttatgtaaatattttctcccattctatagtttgtcttttcactgtattgattgttccctttactgtccagaagcattttagtttgatgtagtaccactgtttatttttgcttttgttgcctgtcctgtgcttttgggtattttgtcctacccaaaaaataattgccaaggccaatgccatgaggctttcctcatgtgctaggaatcttacagcttcaagtctaatatttaagtctttaggtatattaaatttattttcgagtatgatataatagagtataattttcttcttttcttttgcatgtggatattctgtttccccaacattgaataaattatcttttccccattatgtactcttggcacccttactgaagattaggtgatcatatatgcatagatttatttctgggctctctcttccattccattggtctatatatctgtctttatgctagtaccatagcgttttcattaccgtagctttgtaatgtactttgaaatcaggaagggcaacatgttcagctttgtttttctttctgaaaattgaattggctataagattatcagtgattttttagcacagaacttgccagccagaaggcaatgagatattaatattcaaaataatgagagaaaaaactgccaagagtgctatgcttggcaaaccagaccttcaaaaaggaaggaaaaataaagactttcccagaaaaacaagaactgagggagttaattaccactagagctgctttatgagaaacgctaaaagttcttcaagttgaaatgaaaaaatgctgaacagcaacacaatagtaagaaaatatgaaattctttgataaagataaatacataaatacggaatattataatactataatggtggtaggtaagtgacttttaattttagtataaaagttaaaagacaaaagtattaaaaatgacaataaaaatgcattaaaaggtacataatatgaataaataaaacctgtaacaacaataatgttatgttgtaaaatgtgtagggggcagagaagttagtttttgtttataattgaatttaagttgttatcagtttaacatagactgttgtgactgtattttatatagactccaagataaccacatacaaagaatacctatagaaatcgcacaaaaggaagcaaatctagaaaactcaaagaaagacacaaagagaggaaaagactaacagaagaactacaagactaacagaaaacaacaaaatggcaatagtaaatttttccctattcataattactttaaaggtaaatgaattaatctctccaatcaagagacgtacagtggctgaatgaatttaaaaaataagacccaaactacatactatctacaggaaattcacatttatatttaaccgaacacatcctcacctgctaaagcaagaatttagtaccatctcaaaaggtcctttgaaagacaaaattatatcttctcatacattagtctataagaacaattcattattagtctataagcacaatgtactattccagctcccatttatccatatccacttcttacaaaactgctttgaaaacatctcaattctaatgtctacgtcaggagtacaataattggatgcctccaaagctgccaattttctgtgactcactgggtcctaccataaaaggaaatggcaaagcttccataaagtgatgtgggaaaatatccataccatatactggtaggttggagaagcagctatcagaaatatatttatgttattatgtcataaatacatgccgtttttaaaaatcttgattgcaaaaatgtgaggaagcaagaggttggatgtatatgtattaaaattaacagtgattatctctgagtggattagattataaatttaaaacaattttggcttctctgtattttctattttatcttttaagaaaatgtaaattatcttaaatttaaaattttaagcacacacacacacacacatatatataatcccaaatgatcagacagacatttttaaaaattataactattatgcatcttcctaccaaagaaaattacatttttctccttcctgagaagttaaaaaaagaaaactaaagatatcaattacataattcatgacgagtcatccaaccagcccctaacacctatttacaaaaagtatgaaggttagctttaagttgcttggtaaagtcctgaaagtagtatcccaaagtacgtctatttattccgtcaagcatgcaactacattatttcatggaattaaatatgtaatattgaaccatgtacttcaattaaaaatatatgtatatagagttcagatctatccataaagatcataaaactgaaaatttaaaacaaaacaaaacgcttttttaaaaatcagctaaattcatttgtctgggaagctgtttacccaatacatgatttctggtcgggttcactcatttttctgtttttggcatcaatggaaccctttattgtataccacataattacatcccttcttagctagccaacacattatttgtgctaagggaaaatggataccttggtttttgtgtcataaatataacaaggtttcttgttacgtttaagagatttaacccaaatttttctcttaggattgatattgttgcaaatcactaagtctggggttataacatttgggatattacttatctttaaaatttattttctatttttctatttatattttggtgttgaaataaatgtatttataagtacattcctacttaaagacaatctgtcacatggaaattaaaatgtgcaagaggcccctgtaattctaggactttgggaggccaaagcaagcagataaagaccagcctgggtaacacggtgaaattccgtctctacaaaaaaaataaaaaattatctgggtgtggtggtgcacatctgtggtcccagtttcatgggagactgaagtgggaggatcacttgagcgtgggaggtgggaggttgcagtgagctaagatggcaccactgcactccagcctgcgtgacacagtgagactctgtctcaaaaaaatttttttctcaattaaaaaaattgcaaagggtaaattgtgagtaagggctgattattgtaattcaaaagggatgtctccatatcataaactacttgacagagacttggaggaggaagtaggtattggcaggtggtgaaataggaagatggaagaaacacctaaaccttaagtgttaaatgtctgtagacaagtagaagagtatcagaaatactaatgtaagtatatgaaaagccaatataacacatattttatttataaaaaattagtctacagtatgatttttaggaacacatataatatggaaatcaatatttgttcatagtataaatttgcccttcatttttattaagacactgaacaaattgaatgtttaccatgtttcaaggcactttgcaaaattgtcacttatgataagcatggagctatggcctagtcagtcttaaaatgaaaaccccagaatgtattattagcatcatacaaaataaatgtataaagctatttaaaattgcttgtagcatcaaggatacccatgttttatggttcttaggcaaggctaacagtgggggtggtggggtatggatgggcccagttggggctgcttggagccaacagagtctacagtttttacatgagtcatcttttatttagtcattgcaagtgtcaggagaatatctccaaatgtgtgatctaataagtagcatggaatttttactacgcattttgaatagctcatactcagaaactatcccatttccaaatggtccagtctgtccaatttgacagggagaatgtgcaacagctgcaaagaaagacttgatgtattacttgaaatcactaaaataagaaaaccagttccactgtgtttgaaaataatgagtttaaaaatggagtgatcattaaaatggcaatgtttatttctaaattaaatgatatttgtctttattgaaaggtggttttcaatgtaattagtggaaaacattcattgatagcttacagtgtgccattcatggttctaagtgtcttatttgtattcctgagttgatgctcaccccgactttggaagcaggttcttctatcatgaccaccttataaataaaatctgagacacagaaaggggaagcaacataaccaaggacatactggtccttgatacaagtgtcaaagctcaaccaatacattatgcagcctcaattactagtttaaatgttctatttttccaatccactgatactttaaaggttaactatttccttaaacttgattcaagttttctctggaactttaacagactctatctgccagttttccaactgatgggtttctatatataggccttatcttaagtgtacctctcacatagtttgaaaagtttactcttctaagcaagtataaaagtagctattttcagaactaatttgacatgaatttttttccatcagctagttttctgcgcagatcattggactctcaaaattgaataaaaatagtaaagctcaaatccatttgggtaatgtgaagctagaagtatgcataatagagaatggtttagtttttcctctttgtgcacctcaaaaacatctgaaaagatttaaccttctcaaaaaaatgctcacctttgggctgaaaccaagtagaaagaacttcagtttcaaaggaagcattctttttaaaaaattctgagtgaattagacgaggcaattgcctggaatttggttgcatatgaagctacattttgtgcccacacatgctctggtgttgacttcctgctcagtcagtactgatagttattattctataaaataaatatttgcttctcagggctataaatcctgagaccaccttacaatctttaatggacttcatcttttaaagcgaagaggaatgtagcctcctttttcttttggttcacgatttaaggggtggtaggaaaaagatgttggaacatttccctgtctttcaaccaacccccatatctagtggctccttaattatatcctccatggaaagcaattgatgcctgttgataatacataccatatttcctctgtcttaaaacctcaccagtttaataatagtttttggctgtaggggaaggagggaagaagaaatactaccacattaaatcattaaatgaacacattgattatgaggcagaactagatatcagacacattaaattatgaaaaagtatgtcttagaattgaagagatttgagttttgttgaattgaattaaactgaaaataagggcctccaaagaaggattagaactgagagatatgaagtttctttttttctcttaaattgtattaattttaaatatcatcgtcattactgcctctgctttttctttttctttttcttttttttttttttttttttttttggagacagagtctcactctgtcgcccaggctggagtgcagtggtgcgatcttggctcactgcaacctccacctcctgggttcacgccattctcctgcctcagtctcccgagtaactgggaccacaggcacccgtcaccacgcctggctaattttgtatatttttagtagagatggggtttccccgtgttagccaggaagggctcagtctcctgaccttgtgattcacctgcctcaacttcccagagtgctgtgattacagatgtaagccaccgcgtcctgcccattactgccactgctttttctaggagaatctactcccacctacagtctcttctgcatccctaatcacagttgattagacaacaggtagatatttgacaccatctgggccaatcagatttttttcatcctgagaatttgaaattctggctcaatttgctggggaagctgaatatcagagacattaaagtcaggatcagtgtaaagctcctggccaaaatcatcatgtgtcagtcaaagttatgaaccccagggatagccaacatgcagagaatgcagatgcaggctgtgtggttctttgaaagaaccacaaggtggaacagtctcaggtcccagtttttcagtttcactgccttttcaactcagctatacttaatgtgcctccttttgccagttttagccctaaaatcaactttttgttttaataacttgagtggatttttaaaaacaatagacccattttccattctcaagtcattattttttgtgttcatttttagctacaatgtaatgttcatgcatagagatgatatctgctataatattacataggaagctccaggcaaccaaatgaagttcaatgatttactgaaagttttaaccaactgaggtagcgctgggtcctcaactaggttttctttaccgcctaagaaagtgaaatctgctctaaatctacatgaaagctgcattcacttgaaagtaagtattggctgtttccaagttccgttgctggactttgtcagtatgtatttccttacagaaataatgtttttaatggtagttgaatttcaagattaggccacaaatacctgcttgacttatcaagaatctgaagcccacattatttattaagaaaatagtgtgatacaatactgtagcaatggtagctattaaacaaaacagtgcattgaattaagaactcgtttcatgtattgtgaatgtttggcttgaggaagaacacattttattggaagtattatgctgattcctagaagcagatctggttattttcaaagactttttaagagtttcgggaaaccaactcttctccgttatgcctaattatacctcaacatttaacaccattaggaaataaaagtttgggccaatgtgtcccaaactattattagtggttgcctcttgcaagtgagattgcatgagactgactctctttctcatttgtatatttttatactgttcaaactttttaagatagtatgtattacttttataatcagaataaaagcaataaaaatacaaaaaactctacggcttccttctcctggatactgttgtcttgccacagtctcctgtatgatgaaagtcatttttgaattcacaagtagaaggaagagtgtactttcatgtgcagagttgaatggatggagaactaaagaggatttgaggcatgtgagagagttgtctgctgtggaaatagctgagtggcagcttggctagggtgttatcaccagggaaaggaagaaggtgataatagaaaaaggccaagaatggaacacatgaagttaaatgggagcagactttggaaaaacaaggggtagaatcagtgtgtacaagactgggattatcacaagagtagcacttagaaccaggaaaaatccctgtgtagccaataggattaaccttaaataaagatggaagtatgaaagaaagtggataaaaagaccctccttcctaccccccaccaatttgcccaaaaaaatgacttcattaaacttccttcaatatgagaagtggctttacactttgcaaaaataaatggaggaatgcaaacaatattgagagaatatcagttaacataaattcacacaaataccagtaattaactaatattaaagtatttctaagaataaattttgttatcaaggtgaaagaattgtaattcaatgcttgctaaaggggaagaggtgctactccaagaaaataataaaaatagctgacattttttatatctgttttttgtctgacagtaagaaatggaaagactttgcatgaattaccacatttaatcttctcaatgtgcctatgtgtgatgagcaaactgtattttgagattcccaaggtcacacagctaaaatggcccctctaacattcaaaaaagagagtcactggagaagagattgcgaggacatttttatctgcatttcagtctgaccttaggatcaatcatcaggctatcatttaatagaagaaaactgtagagaagggaggttagaagggagcaaaaaaaatgaggcaggacaatttctggactttcaggagggaaaagtgtaaccactgtgcctcatccaggccctctagaacccaattctacacttaaatactgtcttagtctgtttaatgctgctataacacaataccacagactatgtaatttatgaagaaaagaaaattatttctcatagttctggaggctgagaagtccaataccaacatgccagcatctggcgagggccttcttgctataccatcccacggcagaaggcaagaggaagagagaaggcagaattcacttttataacaaacccaccctccaaataactaagccactcctgtgataacgacattaatccattcatgaaggcagaacccttatgtcttaatcacttcttattaggccctgcctcccaaaactattgccttggggattaagttttcaacacataaactttggaggaggagttcaaaccgtagcaaataataatgcagctctgactcatttccatatgtgtagggggagaacagagggcaacaggtgtcttttttgttgccaagaaggccagggcaccctcctcactcaataggataattaaattcactctcttatcatgcctcacaaacatttaaagttgaaaggtggaaagaaggagggaggaagggaaggaaggaagaaagtgtggaaggaaggaaaggaaagagaagaagaaggcagaggagggaaggagaggggagaggtagggagggacggtgagggaagggaaagggaggggaggggaggggaggagaggagagaatagtagagggtagagaaggggagggaggagagggaaaggaaggcaaggggagggaggaagggaggggatgaggaggggaggaagaaagggagggaaaggaaggtgagagagggaagggaagtgaaggtgaggaaggggagggaaaggaagagaagaaaagggaaggggagggaagggaagagaaggaaagggaaggggaggggagggaaagagagggaaggaggacgtctagtcaggaaaactaaaccacactaatactgactggctgtcccaggccaggatcagttccctcatcctccctttctggggttggtgttatcaaggagcacatttcaaagggcagtactctgtcctcatcactcttggtccttctagttccaaacagatcctgtcacttggggctcccaaccctctgtaatttgtaaatcatttctgggaaagaatgaacatatagatatgctctgaatatactcacaggcccaccacaccccaaacacctgtgatggggaccagtcacctaccacctcaggcccatcttctccttagtagaatgaagactttgagttcagtcatctctaaggtcctttttcaaattaagaaaaagaataaatgagaagacaatagaaactaggaaggtaaatagtataagtaatcaaaatttacttccagacatttcctatgacaagacagtatttcccccttctctctcatacacacttcaaattgaagacaccatagattttaatatgcaccatttctttatgtatcactagtaaagaaaaaaaaatgctgccaactaaccatgacacaccattgattatcaaacgcattccagtttcagagatgttaaactgcaaaacatgggtcctagaatcaatgaaatacaatgtgtgtgtgtgtgtgtgtgtgtgtgtgtgcgcatgagggtttgattggtggggaactctcgcttcttactttaaacactattactggctttgttataacatatctttagtacttatcatttagtgcaaagttcattttcatttcttgctattacatatctcactttcaatagctctttataagctcactccaggccatctgaagcctcaagctctcatttggtgctcaaaagtctcctaaacttcctagaagcatcccttaccccattcacaatcattgtgacttttctagttcacttttccctttgaaaatagtccagtcctgtatttcctcctcttaggttttgttaaatgattggaataaaatttacgaaccaatttcagttagagtttttatggtgggaaatagcttattgtataactttttcagatgtcaaattgcatcttaatgtagccttcttacaaaggaaaccaatgtgcatttattgagaaataaagagggaggtatatggagtggaagagttttgttcccctgaaatcatactgctttgatcactgtttattgcctcaaatatgtaagtctgggtggcccagctgccttcttaccacaaggctaccgaaagtctgaggagaaacttccctttcttttgtctcctgcaggaatgccaaaacaaagtctcaaaaaaatagtaaatctaactggctaacacgaccaccacagatgccctacgggattctcctccttctcttccccctctgtctcctctccatcatcattatcatcttcatcatcatcatcatcatcactaccaccaccaccactatcatcatctctagcttccctctttgacttggctgctaaaaaaacccttggaatcaaagtaattcccttttttttttagacagagcttcactcttgttacccaggatgcagtgcaatggcgcgatctcggctcactgcaacctccgcctcctgggttgaagtgattctcctgcctcagcctcctgagtagctgggattacaggcatgcaccaccacgcccagctaattttgcacttttagtagaaatggggtttccgccatattggccaggctggtctcaaactcccaacctcaggtgatccacccgtctcggcctcccaaagttctgggattacaggcatgagccactgcacctggcccaaagtaattccctttctttaggaagtgtataggaacccaatacctatacatttgaatactaatcttactgcaaattgtatcttaattttgaatatttttattgatacataatatttgtatctattgatgggatacatgtgatattttattacatgcatagaatgtgtgatgataaagtcagggtatttggggtatccatcaccttgagtatttatcatttctatgtattcggaacatttcaattcctctcttctagctattttgaaatgtacagtacattgttgttaactatagtcaccctactctgctaatgaacattagaactcgttccttctatctaactgtatgtctgcaaccattatccaaactctgttcatcacccctcctccctcacacctttttcagcctctaatatctatcattcaattatactctctacctccatgagatcaacttttttagcttgcatatatgagggagagtaggtgatatttgtctttctgtgcctggcatagttcacttaacataatgacctccagttccatccatgttgctgcaaattacatgatttattttctcttttgtttctttgtttgtttttctgttttgttttgttttgaggcacggtcttgttctgttgcctaggctggagtgcactggtgcaatcatgattcactaacttcaacctcctatgctccagctgtcctccgcctcagcttcccaagttgctggaacacaggtgcatgccattgtgactgcctattttttttttttttttttttttttaaagataggatcttgctatgttgctcaaactggtcttgaactcctgctctctaaagatcctcttggcttggcttcccaaattgcagtgactacatgtgtgagcccccatgcctggccaatttcattcctttttatggccaaatatattattttattgtaatagatgtaatttggaaagacattttgccttttctataaataagaatgtcttcaattaattagccctttacaggtttttagcatttttcttcatttagaaagtgcttacattggtatccacactattaatgggaacaaaattggtaagatttatctggcaggcaatttgtcaattacattaaaaaccttaacattatgcatgagctttaaacctagaaatttcacttccagtaacttattttcagaagaaagtttgagataggtacaaaatgtaatgttcaagggtattcattacagtgcatttcataatgcctatcaatatgaatttgattaggtaaatggtagcgaatccaaacaatggactattagactgccattatatatcatgttgttcaagaatattattgacatgaggatgttcataataaattcctaatcccaaaacacaggctgcaaaataaaatgcccactattatatcattttagcatggcataaatattaaaatgtttggaatcaaagacatcttggttcaaaccttggttccaacactcagttctatcatttgctcctcatacaaatgtgggaaagttattgagcctcacagagccccagtttcctcatttgtaatttagaaataattacagccacctcttagggtttttgtaaagattaatttaaataatgtatgcaaagtatctgcttctccacacacaaaataagtgctctataaatggttctctacatcaggcttgtgtgtcagttggggttttttgattacaagcaacaaaaaaatttggccaacttaaacaaaggggaatttattaaaaacattgcacaaaagttggagaactaggcttggaaataggcagacaccaattcagcttcaggggcgggaaagcaggaatgataggactagtcttgcagtggaacagtctggcagggatattcctgccaagataaaagaatgccaacctcttcactcacccaatttcatatgctcaaaagtcaaaatctcagcagcgagctttcatgggttgagctgaagagactgcccacctttggccacaggaggcacaggcagctggattttccatctcagtaaaatataggcagtggtgtggtaagttaactccccaaaggaaattggggttctgttgtgaaggatggtagatgctactgacaaaagttcctctgtcacataagcacgaggtaattttgaaatgggaaaaatataaatcaaatatttatttaaaaaataaatcacatacatgatcacaaatgtatgatcatcacgaaagccctacaggaaaatcaggacagaaattattttcttgattttacaaagagaaactgaggctcagggatgatgaatgactagcccaaggactctgcacttaatctggggcagagctggaaaagacagtcctgacccccagtctcaggctctttcccaggtaccccctgggaaattgtcaaacatctctcagtttccctgcttcccaaccctcaacttcaaaggatgcagattactgttggtatttccctttcttataactcgttagtccctcctgctgcttggagttcaggccctgccagagggccctgagctggaggttctgctggaagcattacagtcagctaggctgacagtggctgggagacttggcagactttctccttcacatttggctggggggaggacggagagctaagaaaccactggagaaaggagggaggctggaggaaggcaagaaggcaggggccaacctggagaggaagtggtatgaagaggaggtagtggggagacaaagagaatgattttttttgaaagacaaaaaaaaaaaaaaaaaaagaattagaaatatggttaaatcagccaggaagtggcccagtgaccaagatctcctgaacctggcttcagagaaaaacattaaagcttcacatatttggcattcaagtcactaaaggttgctttctgctttttctttctcattaaagcatttggaagaacccaccagaaagcccaaatgtattaaaaattcctgggctccatgcgtaaaaatgatagacgaacaattctagatggatcctatttaggagccatctaatatatgcataatatatgcctttttcagttagagaaactgaggcacagaattacaatatgtccatgacttcttttttaattgaaaaatttaaaagtatgattttccaaacaaggagttggtaaacttttctataaagagccatctagtccatatttttggccttcagggccatatggtctattacaactactcaacactgacgttgtagagcaaaagcagccatagataatatatagacaaatgggtgtggctgtgtgcccataaaactttatttacaaaaacggggcatgggccagatttgtagtttgtcaagacctgatctagacttagtcatttattaccacatgaacatcccagaagaacataaaagcaaatggtaggcatcaatttaaattcccataggaatgataatagtaataactacaatctattaagcacttcctatgtggatttcctcatataattgttctactgtcctatgaggaggatgctattgtgcttgcccatattgttagataagaagacaaaaatacctgcccgtcaaacaactgccagggggtggtcacatagctagaaggtggtagtggcaggattttgacccttgatccatctgacatcaggagtcaagtgcttaacaactataccagctaaaaaaatgcaactagtaaggaagaaaaataaagttacatgaagtttatcacaaagcattgactttttcatgttattacaaaggaagctcttggtagtgtaatactttggtaatgcattcattatcagcaacttgaatgaagcatgaatctgcaccttcccccacatcctcccagtttccttggaacgttcattttgttacctctttctcgtgatctgttaggctttctccagcatacacgctaagatttaagaaaggatcttaactcacgcccacccacctcagacgctgaaatgtgaaaggcctttaacactaagaggaattcaagcctgaaggggagaagaggacagctcttgatgattatcctaaatttttgaagccaaaccagggaggacttgaggaaatgactcactgaacccaggagaaagaaaaacagccgagagatggcaggagaaaatgaggataatatagccttactgttaaagtgagggttagaaatccacagggacccggaaaggaaacactgaaatggctgagttacattcctgaaactagcatgcaatattgttttatcaggcttacggctgttttgaccaagaatgaagcaggaacagatttcttcttaacagaaacatcatctcatgttctttactgtccccaaagtgtctcctctgctagagccctaaggggaaaccacagccatctctgtctcttctattcttgaatcacaaaactggctgttcctgacacagatgctgagcttggtgtgacaaacagatgtactacactgcagccactaaaatctgctaacatctgtactgaacctgtggaagaactttgagccatcaactttccggctaaaaagagacctgattagaaaattcgggaaatgttttcaagcacgaatacagttgctttcactttttaggtcactagaaacagagacaaaactatgaggtaagtgacttttgtccttggtcttttctaatccacctaacatattatgactacattaaccttcttaatgcaaagttctgataatgttactcctgaactcacaaacattcaaaagttaacacacagtatttgtaaagctgctgttaaaataggcattgttatatattcctggtggaaatatacattgctataatctctaaggagagagttttggtgacacctactgtattagtcacggtctccagagggacagaactaataggatgtatatataagagcaaacggtaggcatatatatatatatatatatatatatatatacacacacacatataggagtttaagtattaacttacacaatcacaaggtcccactatatatatatataaagcaaatggtaggcatatataaatatgggagtttattaagtattaacttatacaatcatgtcacacaataggctgttggcaagtttacagagcaaggagagccagtcctagtctcaaactaaagaacttggagtccagtgttccagggaaggaagcatccatcacgggagaaagatgtaggctgggaggctagaccagtctcacctcttcacgtttttcttcctgctttatattcgctggcagctgattagatggtgcccaccagattaagggtgggtctccctttcccagcccagtgactcaaatattaaatctcctttggcaacaccctcacagacacacccaggatcaatactttgtatccttcaatccaatcaagttgaccctcagtattaactatcatacctgccaaaattacaaatgcatatactttttgatctaggaatttcttctacagccttacttgcatttgtatgaaataaagcatatttaagactatttgttgccatattattagtaagaataacagattatatatacttctgctcctaggtagaatgtagtaggtcaaagcaggtcaaaggtcttgctgcagcaactagtaacaaattaatacattgaaagaaacatgttaaagttataaaagagctatagaggaccacatgatgtctaggtacagaaggacgctgggcacagtgactcatgcctgtaatcccagcacttgcagaggccaaagtgggtgtatcactagagcccaggagttaaagaccagtcatggcaaaaccccatctctactaaaaatacaaagattagccacctgtaatcccagtcactcaggtggctgaggaatgagaatcacttgaactcaggaggcggaggttacagtgagccaagatcgcacctctgcactccagcctgggcgacagagcaaggctctgtctcaaaaagactaaaaaaggaaaaaattttcttaaagctgagaagaaatagacactccaggctctcaatcaaaagcttggaaagactatatctaaaaagcagggataaaccaggggtggacagaatcttgctaaaattgtaaatgcagccctacttcaactcagttcccattgaaatgaggtaattagctcctggtcctaacaaaaaagaaaaaaaaaagatacctctctggtggaagataccatcagaagtctacagttattttataccaatgcccagcatgcaatcaaaatttactgcacattaaaacaatcaggataggtaataataatcaaaaaataaaataaatacaagcccaaagagaattgagatgagaaaaagcacaataaaataaccatggcatgttaaaaaaaagtttcaaaaagcatgttaaaaaaaagtgaaaattatattttaacagataattgggctctatcaaatttttaaatgggtattttagaactgaaaagtataatgtttggatttgagaactaattaggtaggtttaaaagcaaactggatatagatgataggattagttaatttaaagacggatcaatagaaactattcaaattggatcacagagaaaaaccaaactggaaagaaagagtatgtccaaatgtggaacatactccaacagtttaataaagtgtaatagagtctcaaaggagagaaaggagagagaatggagcagaagcaatatttgaaaacacacaactgagaaatttctaatagtaatggaagatataaacccaccaattccagaagttcaagagtccctaagcagaataagtacaatgccaacagtaacaccaacaaacccaccatacctggacacattgtagaaattgttgaaaaagaatgacaagttctaaagcaaccagagctggggaaagcccaagtcttcaggggaactacaataagactgacagctaacttcaaacaaaacaaaacaaaacaaaaaacaaaaaaaaacactgtgtggcagccacggaattgcacccctcagatctcccttcaagagatcatgctgtggggcgctcatcttattgacagctgctgcactgttagatccactaaaactttcatatcaaatcatacttcccctgggctgcttccagtcaatgaattagctcaatgggggtatgaaaatcaggctatattggtagatgcagaatttctttaacaggcaatttggctcaggagatctctactgacctggccatgaatttaacagacccgtcgatagtctgaggctcttctggcctaatccttcctcacctgtcttctttcacaggtgctggacctgtcttggtgtctgaaggttctccctgcctactcctctccttctttttttatcctttacaggcatttcccccgaacaaatttcttatatttttaatcctatcttggtgtctgcttctcatggaacccaaaatgacacactgtggaaatcaggagacgatgtcatgatatttttaaaatgaaaaaacaaaaaggcaaacaagacctctcaacctagaattatacaccagtaagaatatttccttcaaattaaaatagaatttgttgctagctgcacagcattgaagtaagtactaaagggagttctaccagcagaagggaaattttctgagctagaaacacagaaaattagaaggaaatgaaaaacaccgaaaagactataaatcagtgaataaatataaaagaatactaactatttaaagcaacaaggcacagtggctcatgactgtaatcccagaactttgggaggctgagaaggtaggttcgtttgagcccagagtttgattgcagcctaagcaacatgatgaatccctgtctctaggaaagatactaaaaaattagccaggcatggtggagtgtacctgtagtcccaggtacttgagaggctgaggaggctgaggaggcaggaggtcaaggctgcaatgagctgtgattgagccactgtactccagcctgggcaacacagcaagactctgtctcgaaactacaaataaacaaataaagcaacaacaatagcatcttttggagcttagaacatgtaacatagtgtaaaatatgtgacaatagcaaaaaaggtaagagaaaggggcaaatggagtcaagttataagattcttacattctatgtagaattagattactagttaaggtagactgtaactagttaaggatgcatgttgaaatcgctagggcaatggttctcaacctggagcaatttcactcaagaggcatttgacaaaagaaatttcactaaagaggcatttgataaaagagagaaggaaaggaaaggaaaggaagaaaagagaaagaaagatgaagggaggtaagaaggaaggaaagagggacatatatttggcaatatctgaagacatttttggttgtcacaattatgggttggaggagatgtcaaaattattctgcattgaaacactaactaaaagatggatattctcagagtggattgaaaaacatgacccaactatatgctgtctctaagaaacttacttcaagcataatgatataggtaggttaaaaataaaggatacgaaaacatattcaatgtaaatctttaacaaaagaaagctagagcggctgtattaatatcagagaaagaagaatgaagagcaaaataatttaccaaggataaagagggacactatataatgataaaagggttatttcaccaagaagatacaataaatccgaagtatgtttgctccttacaatagaacttcaagttgcatgaaactaaaagtagaagcagacaaatccctcattataataaaaggcttcaactctcccttctcagtaattgatagaactaataaaaaatcagcaaggatattaataaactgtaaaacactatcaactgactggatctaattgaaatttttagaacattccaggaccaatagcagaatatatatttttttcaagtgcacatggaacattcaccaagatagacagtatcctgagttataaaataaagtttaacacatttaaaagaattgaaatgatacaaggtttattctctgactatactagaattaaactagaaactgatgatagaaagataacaggaaatctcaaaaacttgacaacacacttctaaataatccatgcattaaagaagtctcaagggaaattagaaaatatttggaactaaatgaaagtaaaacataccaaaatttgccagatgacaaagcagtgcctagcggggaatttatagcatcaaatgctaacagaaagcaccttgagaaacccaaaaagaagagcaaaataaacccaatgcaagcagaagggaaaacataataatgcagaaatcaataaaattgaaaacagaaaaagagaaagtcaatacaaccaaaatcttgttctgttaaaaaattaataaaattaaaattgtatcaaaattgacaaagaaagaagacatacactactgatatcaggaattaaaaagaaaatatcacctagaccccagcatacattaaaaaaacaaagaacttatacaagcaattccgcacacaaaaatttgacaacctagaaagaaaaaatggacaaatgccttgaaaaccaaaaatgccaaaactcacccataatgaaacagattatctgaataatagaataatacaaaaaattaaataaattgaattcatagtttaaaatcttctggaaataattcatccagcatttctatttgtttatattggtaagatttcaggttatcttagctcatatattaccagcagtgaaactctaagttgttctgtttagttttttaagccaatttgagttgagttttctgttatgtgaagaaacagaaaatagtgttatctcccaaaacacatcagaatttctaatattaaccaacctgtacccttcagaggacattttgatgtttcagaattctaaaaacaccgttaagtttgtggagctcaaaatagtattatagctgttgagtgtccaaatacaatactgaagtgactccgagaagtaattgtaggaagcctggaagcagtggtagccctagtagtagtagagtaacagtacttgtgggtaagagatattaagtacttatctgtggcactccacgaagaactgaatatatgaaataccactgtacagttttatacatgagtaaatggaaatacagacaataagacaaataaataaaaacacagataaagtaccacgtagaattttctggagaatagttttcttcccagcctacagcctggttgtgctcctcctgctctggagaagaatggatttaaaagaattgtcatttttccccacccataggaaaatagctgaaacaatacatatttagtttcccagggagtgcttccagcatgagaaaaaccaagttatggcagaatcaagaacctgccaataccaaaagtgagctttgttctccagcctggacctgcctttttcataaattagcccatagattcaccatctgtatttgcacgcacacacacacacacacacacacacacaactagccaggaatggatgcacagtgtctatggcagagagctcccagcttaacaggagggctgtatcaatgagatggtcagtctttgagctgatacaacaatagtcttcaaaaagaacatgcacattccccttgttcacttattgaaacagaaccttgaaagcactgctatgcagtgtctcacagtatgcccataaacttttgctaatttcaagaaactactgccattaatctcctcaaatttgataggaaaaaaattatatacaagtgggccgggcgtggtggctcatgcctgtaatcccagcactttgggaggccgaggcgggtggatcatgaggtcaagagattgagaccatcctgaccaacgtggtgaaacctcgtctctactaaaaaaaaaaaaaaaaaaaaaaaattatatgcaagtgaactgaaaaaacaaacagatgagcaccatttatttctacactttctccattctaatgaggcaatggtccaagaaaccacattcctgcccttgtaaatcaactgccaacatgaatgtgattcttcagctatgagaaaatgtcttctaaagggtacaggttggttaatattggaaattcttgtgtactttgggagataacactatttgctctgataaggactagtacttttttcttcctttttatctggacatgtcaagaatcagtcatgtcattttgcatttttcctttttcttcctctcacccttgccccctttgggattcatgccagtaacatgttttcctgatacagcagtgaatgtaatccagtattgacatttcctatgttaaataaaagtttgagacttaggaaaagtacacatttaggaataataaataaaagtttcaatgtggagcagctacaaagcaagagtatactaaccgtaccaatccaagtgtatagctttatgacttttaaatctcttcttgtaaataaattccctagtgttagggtttacacttcaaatgaaaagaagatgggtggatagaaagaaagaagacagagagagggaaaaaaggaaggaaagaaggaaggaaggaagttaggaaggaaggaagggagggagggaaggagggagggagggaagggagnggaagnngaaggaggaaagggaaaaatggcaggcaagtgaggggaggaagggggagaactccaagtgcggattcaaggcacttgagggagtaagccaactctgaatggcaaaaaaataaactacagctaactctggaatttccagctacctattggttactgtttggagagaattattgacagatggatgtttactctcagcaaaaaagctcctgttttatgagattggtgagctttatgcctggaatacagatggttatcagtaaatttttagtaaatgaatgagtgagtaaatgtacaaatttctttttttatgttcataaaactgaagcctacagatgtttagtgagttgcccaaagtcatatagaaattcctaggtgcttgaagtattctagatggaaaatttaagaaagatcaccaattcagacctaagagatctagattcttgttgtgagtttgttttgtcatttcacctctcaggacctctacattgcagaaggcagagactcatctatgttgttttctcttgtaccttcaatgcttaacacagtgtttggcatatactagatgctcaataaatatttaaatacttaccattttcccatctgtaatatttagtttgcctgtatgaaaactgaggaggttggccgtaaggctttctgagtgcgtcttccaattctacccctctgtgggagaggatctctgcttccagtcgtttttcataccctactttctaacttccactgctccagttgcatgggaaggcaaacacaggtgggtgaggttccaacatcctttctccaatgttatatcatcatccctctgagctcttatttccacaagaaaaaccacaaaaacacaatcttaatggaaaacagtgaatcaatcaattacttcattgtctattttgtaaaattagttccagaatcaccacagacctcccaatctccaaacctcagcagccaaagattccccaaactttcacattaggtgttccagccactcttccctagagggatactcaagcccctgtgacattccttctccttgtcttctgtgggagcagaggggaactcaacagcaataagcagcctgggaaaaaaatagcagccacaatgctccatttattataggatggtgtcttgagggaaacttaactctcccatactcctaaggtaagtccttctccctcctttcatgacaatttcctagccagaaaaatagtagcaaaacctgtaccacaagcaggagaatctgtccaagtgtcagcacagccttcctatggttcgaagagggaaagggctcacccacccagaagatgcatgtttctcctcttttgacaactcccttcctgagaaggaacagccctggcaggggctattcctctgtgactgtgaagtaatgtggagtattctgaggagggccctggtcaggagttcaagaatccagtttacctccgacagactatgtgaccttggaaaattcatttttctccaagcttcagattcctccatttttaaaatggattttcccttttaaatgattataagattcctttttaaaaacatttttcttatttcataaataatacacaatcactgttgacatttttaaaagtatggataaattaaaagaaaaaataacaataattcacaatcttaccacctaatgattgacactgttagcatttttatgtattccttttggtgagactgcttgggattttagcatcactgaatatatatctcccagtgagagttgcctcttcaaagcctttccaagccttgcacatgtaccaacaatgctgcccataaattaggaagttggggaactgctcttcggtaactcactccctgtagactgtgactctgtctttggaatgtccttggtaataataagtcatctgagggtcgtagtgattattggaagagtcatttgaagacaaatttacatgattggaagaatgatcaagctgagtacctccatttgtttttctttattttaaagtcattcctataaagtttaaagactttttcatgtttctctggtgttttcaaaatttttgatgtgtacgtttacagaaggagaggaataaatttcattattttggagcaacatttctcaaagtgcgttctatagcacagcagatactggaaatgccctccagaaagagagttctctgatcaaaggagtttggaataaactacacactccatctagttccttaaagactcacaaagaacactgaatatattaaaagctctgagatttctccacaaataaagccctttaactttaattaactgtagtttctaaacttatttcagtttaagacacttacttgggaggtctcatgagacttattcactgtcacaagaacagcacaggaaagacctgcccctatgattcaattacctctcactgggtccctcccacaacgtgtggaaactatgggagctacaattcaagatacgattcggatgaggacacagcaaacccatatcacatgtgaaatataaaagtggaagcagcagtgggaagagccttgtaggaacttccagtctccagctccagtacagagaagccatccttgactatgtctcccagcggcccttgggaaggcagcctgcagaattagggaggagtcacagggtgaaagaatcttccagctgaaatttgtaacaattttgactgggcatgaattttcttgagcagaattcagggtgcgggcaaatgggaattgctgcagatatgagtgcaggagctgctgctgacattgtgggcagaaagggaggggcaaggcctgaaagccattcttgccttcttagtggggaaactatggcctggagaaggtctgagttccacatgcaggctgcctggatctaaactcagtgctgttggcagggcactgtgggagtaagactggcctcactaactacatgggagctggatgaggcctttcactaccagctatcccccacttctgtggcaaactatatgacacaacagaggcaggcataatgccctctggaacataaccccattggcctgagaactatcccccaacccctcacagtggccatggcaacccccacccaaggagagtctgagaacagacccgcctaaccctaccgccacctaatggtagttctctacctgccctggtagctgaagacaaacacataaactcttaggagctttatggtcccacccattgcttgagaaaccagaatacttcccctggccaatttagggcaaacccaaatcccactgctaataccacagctggtgctctcttgaaagcaccacctcctggttgaaggccaaccaactcaggccattatagcaactcatgacagaataaccttccgtccaggaaggagaaaactatagctaaaacaactgcctgaaacttcctagctaactagagatcctgagggtgtccacatgacaactttactactagcaaaatcagcatttgagaaaaccagcacactaaacatatctacaatcaaggattctcacagagtctccttcactcccctgccacctccaccagatcaggtgctagtatccatggctcggagacctgaagatggatcacatcacaggactctttgcagatattccccagcacaagcccagagcctggtagccctgctggatggctagacccagaagagtaacaacaatcattgcagtctgtctctcaggaagccccatacctagagaaagggtatggagattccctaaagaactaaaagtagaactacaattagatccagcaatcccactgctaggtacctacccagacaaaaagaactcattatatgaaaaagacccttgcacacacatgtttatagcagcacaattcacagttgcagaaacacagaagtggcctaaattcccatcaatcaataagtggataaagaaaatgtggtatgtatataccatggaatactactcatccataaaagggaatgaaattatggcattgacagcaacctgaatggagctggagaccattattctaagtcaagtaactcaggaatggtaaaacaaatattgtatgttctcacttataagtgggagctaagatatgaggacacaaaggcataagaatgatataatagatttgggggacacagggataagggtgagaggagggtgagggataaataactacccatcaggtacagtgtacactgctcgggtgatgggtgcaccaaaatctcagaaatcaccactaaacaactcttccatgtagccaaaaaaccacctgttccccaaaagctattacaataaagtaaaaattttataaaatataaaatcaatatttttaagtgtgtgtctatactagtgggaaaaaaaaagaaataacaagaaagagtacattcaaagcagaaagcaacccaaaagccattgtttattaggggtcatctacaagtctctagtagcagacggcttgggattaatggcccatgctcaagtgacaaaatgcaaaccctgaaatcagtgcattatggaaggttgatccatagaccactgaatacattcaggagctccaagagacaattaggtcaatggatgaagcaggggaaagataaaccacacagaagtgggtggtgaaaaaactactaccactactacagtgagatatctcatcctagttaaagtagcttatatccaaaagacaggcaataacgaatactggcgaccatgtggagaaaaggaaaccttgtacactgttggtgagaatgtaagttaatacagacactatggagaatagtttggaggttcctcaaaaaaaaaaaaactaaaaattgagctacatatgatccagcaatcccattgctgggtatatacccaaaagagaggaaatcagtatatcaaagagatctctgcattcctgtttgttgcagcactgtttacaataattaagatttggaagcaacctaaacgcccattaacagatgaatggatacagaaaatgtggtacatatacacaatggagtactattcagccataaagaagaatgagattcagtcatttgcaacaatatagatggaactggacatcattatgttaagtgaaataaaccaggcacagaaagacaaatatcacatgttcttactcatttaaatgagattcagtcatttgcaacaacatagttggaactggacatcattatgttaagtgaaataaaccaggcacagaaagacaaatatcacacgtacttactcacttactgatttgatttctaaaatcaaatcaattgaactcacggacatagagaataaacagatggttaccagaggctgggaagggtagcatgaggttgtagggggaggtagggatggttaatgggtaccaaaaatagttagaaacaatgaataagacctattattggctgggcatggtggctcacgcctgtaatcccaacattttgggaggccgaggtgggtggatcatgaggtcaggagatcgagaccatcctggctaacacggtgaaaacccatctctactaaaactataaaaaattagctgggcatggtggcgcacacctgtagtcccagctactcgggaggctgagacaggagaattgcttgaacccaggaggcagaggttgtggtgagttgagatcgcaccactgcactccagcctgggcaacagagtgagactccatctaaaaaaaaaaaaaaaagatctattgtttgatagtacaataaggtgactatagtcaatcataacttaatcatacattttaaaataaaaaagtattgtccaggcgtggtggctcacgcctgtattctcagcactttgggaggccgaggtgggcagatcacaaggtcaggagtttgagaccagcctgaccaacatggtgaaaccttgtccttactaaaaatacaaaaattagccaggcgtggtgcgcacacctgtaatcccagctattcaggaggctgaggcaggggaatcgcttgaacccaggaggcagaggttgcagtgagccaagatcatgccattgcactctagcctgggtgacagagtgagactccatctcaaaataaataaataaataaaagagtataattggattgtttgtaagtcaaaggataaatgcttgaggggatggataccccattctccatgatgtgcttagttcacattacatgcctgtatcaaaacaggcatgtacatggggtacatctcatgtaccccatagatatatacacctgctatatacccacaaaaaaaattttttaaaccttacaaattaaaaaaaaaaagaagaagcagatggtggaaacacttggctatctcagccttaggtttacatggtacagaataaaagaaaaaaaaatcccctgataatttccaactcacacaggtctggagccagaactcatactgccaaagcagcccaaaaaaaaaaaaaaaaaaaaaaacctagctgaaaaaattaggctaaaaagacttcaggttgatggtgccataaacacccgatagaagcaaaagccaattatctattgggtaataaacttaaagacaggcctcaaagatgttccagagggatatgagtacacaactaaaaaagtcactaagcgcactagaaaacaagtcatcacaagctacaaaatcagcctgagacaacagatgctgaaatgatcagatagcaaatataaaataagttttagaaaccacaaaaagtagtcgaagtatcaacattgatgagacaaagagaaaaaatacaaataaagtatctaaaaataaaatttaatcattaaaatttgaacctcaaaggaaggtttaaatattggtttagacacagctgaagggaaaatcagtgactttgaaaatacacctgaaaagttacacaaaatgaagcactttacatgaagagactgactaatacaccacaacagtgggaaattttaatgtacttttctcagtaattgataaacaaagcatatgaaaaattagtaaagatatggaagatttgtattacataattcactagtttagatttttgtgaactgactgcctcctgaaagaaatgacagtatcggctgccagtcatcccttagtgtgaattattttacctggtccttttcctatgacaggtagcttaaaatgattctgagcaaagaggattttaaacatatcgccagcctcatttccttcaagaaacactcccagaagactacacagcaattagctttggtgaggcttatatttatgtaccttctggtaacttaatattggttactttatgtaattctagttattttttattttttgttcagcttccaacataatattaatatatgcccatcattaaacacttgaaaactacagataagccctcaccaaaaagaaaggaagaaaagtgagccataatcctatcagtcctgtatagataagcattgctaacattttattatatatagtcgtttcattttttaatgcataattttattcattgactgtttagcactcaccatatgcatcacaccgtcctagcactcggcaaaggtaataaaaagtcaaagttcctgtcctcatggcacttacattttctacatttttatatgggtaaatattcatactttgaatttcaaaacaaataagagggaaaaactaaatgggataatcaataattattcatgttatttgtgtatctgttattttcccactgagaaaccagttcctaagaaccagatggcattaaccatggtattcttcatatcacctggcaaagcaaccgcttatagaagacacttaacaaagttttgtgaatccagaagttgaggtcaaagggagcagggaaaaggcaggaggcttttggaatcatggttccctctcctctttgggcaggtactagtttaatgataaaccagttctctggatgggagagagggaagccctgatttgtagtgtttactgatttccatggtgtaaatactcacacatgggcaatttcaagcttccaatgttacatcattgaatatagagtttagaaaaagtgcttgtaattgattctcatgagctggtacaaattggctccagcatatcatggcttggccctcactgaacccttgcatcctctgcctcttagagttctagcagtgagtgccgtgggaaatgggagttctctctagaggaaaaggagagcacagagacagaaggctgggatgccagagaccaacttcaccaactcctctttttggttgaatctgtttttcttttcagaatccttctgatatttaggttatcagaatttcctagaacaaatggaaaacttactatgcacaatactgtggtgttgcatgggatacaaaaacacagagacgtgattcccgttctccacaagttcactatgtagcgggaagaggatcagacaggttgctaagatatcattttaaaaactggtagagaaaattaactttctcaaagatataatttctcatggggtttcgaactcattataataagggcttttgtgtcagaaacatataaaatcaaaacccttaatctgccacttactagtactatgatcttaagcaattgattaataactctatgtccttgcctcataggttgttgtgagaattaaatgagacaatgtgtggaaattcaatgcatggtgccttgcacatagtaagattcaataaataccaataagagtattactagcaatagtgtttgtaataccatataaacaaagacaacaaaacataaaagcctggggctatgttttagccagttctccagggaaacaaaaccattaggatatgtatatacatagaaagaaatgtattttaaggaattggtacacatgattacggaggctagcaagtccaaaatctgcagggaagaccactgggctggagacccaggaagagacaatgttgcagttcaagtctgaaggccatttattggcagaatttccctccagaagaaagtcagtcttttgtcctattcaggccttcaactgattggatgagacccacccacgttatgtggcgagcagtctactttactcaaagtccacaaatttaaatgttaatctcattcaaaaatactgtcacaaaaaatatccagaataatgttgaacacgtatttcaaaattattaaaatatgcatcaacatggcccagccaagttgacacataaaattaaccatcatgggctgattatttcagggattacctgggaataaggttttattaaattaatggaagataatattagagaattatttatttttggagggcactgagagccaggctgtggggtttgcacttgattttatgaatgacaaaaatcagtaaagatttagtgacatgatctgagctgcacttaaagaagatcaaacctaaattattgccacttgcacctacaggcttggtagcttctgctgatatttggataaataaaagtaatagtgtgtgtggccacaggacctggatggtcaagaatttgccttcagggatctccctttggccttatccccagggatgattttcctccaaaacaggcagtgtatgttttcctgaagctatacaagtcttttccctttcttactttgctattccttggctagcagaattactctaaaaataacctttaaaaagatcccaaaccaatgagtataagagttatctaggaatcaaggaggcatactaaggctcagcaagataagcctgcttctctggcacagcctgtaatttgtttttccaagtttggtggtaaccacatcattaacaatagctttatacatttctgactaacttgtgtaagaggcactgtttttcaactttgttgacacatgaagcaaataagctgttggagaagtctgttgcacaactggaaacaaaatggatctcaaacagtttacaacggctgggaatcagggtttgggaggtggtccaaaaatccctgcttcctgttgaaagcacattcagctcagtgggatacgtttgtctggttgtgatatgtaagtggtctctgtggtgtatttacacttgaaattttcactgattcctgttatttcagaccacatacacccacacaactatggttatttagaatccctaactggaatacatcaggagtaattgcattggtatgccatcttttgttgataattggaaacttttggatgcaacacaagaagttaacaaattcccttgaacttagccatatgtctgaagagttgtagcaacaataattttctgcatatcactagctggaactcaagaaggacttttgactacagcacaggtctagccttaatggtctttagaatattatttcataaacagaaacaagattcttgcctgatgaattattcatagacctggatgagaactcatattgcacaagatctattcaaagggcctttcttttattaaactacagtcaggccaccaggcaaagataaaggtttctgttgcaagacaaatgaaacacccccatgcaatttatcacgtgtactgattcaaactggaggactcaatgtgatgttaaatattttccacatctgattatacaagtgacagaggaaacacagatggagatgattgtgctttggatgtatttgggaaaactaggagagtttattatttagtatatcacatttccctcccttaaatactagtgaaggagacattctctagaaaaatctattgatcagagattagtcagccaacatgaggaggcaaatttgatttacagcatataaaaacaaaaatctaaacagtaaagataaatacagcaaaaggttttttaaaaatacttccgatactgggtatatatcaaaggcaaatttatgtaaggaaaaatggcatatgagttattcagataatatgaagtaccaacatgatcaatatcagatgagctcaggaaaagccaggatggtagaaacttcagtagggctttgagtaggtacagaatttagtggaagggagggaccatggttagcctgaagagcttgggactatgaaccaagagaaaaaaactcccagtcttattttgcccctaacaagctgtgtgacattgggtaagtcattcatcctatctaaacctcagtttccttatctgtaaaaagagttggccagggtaaattatttaatctccctatgatgctaaaatttaactttctgctctttcccatttttctcatatttctggtcctatatcagaagaaatcaatgtttttaagaaaatcaatagtatatcataacaagattttatactgaaagctacttgcaaagaaatggctttattcattcagccatttattcattcttttattaattcaacaaaaactgattttgaaacccaatgcctattgtaaactagatactgtagtatcccacaaaggtcttcccatataaggataaagtggacacatggcctaccttaaaggagtttatagtcttatggtagagacggacatataaacagataattttaatcaaaggtagatctgaataatagagataagcacagaaggctttaggagggaagaggaagtactgtatatcccctatttgggatggcggaaggcttcatggaggaggagacacctgagctacaggatgagtagaggttagttagtttatgtagagaagaaaggtggtcaaaatatggaagtagaaagtgttaaaaagctgttaggagttgctagaatgtaaagcacaaaacaaggaatggcagcataagatataagtaaggactatatagtggggattcttgtgttccttgtaaaggaacttcattttacccccatagatcaatgcttctcaaagaattctacaaccctcatgcacctgaatcacttgggaatcttattttttaaataacaatttttggttctaacctagacctgctgattcagcatttttagggataagggctgaagttttgcgttttaaaacaagtatcttagtatttcagatgcaacctaaagtttgagaaaaaggaacacttttacattgttggttgggttgtaaactggttcaaccattgtggaagacagtatggcgattcctcaaggatctagaactagaaataccatttgacccagccaacccattactgggtatatacccaaaggattataaatcatgctgctataaagacatatgcacacatatgtttattgcagcactattcacaatagcaaagacttggaaccaacccaaatgtcccatcaatgatagactggattaagaaaatgtggcacatatacaccatggaatactatgcagccataaaaaggatgagttcatgtcctttgtagggacatggatgaagctggaaaccatcattctcagcaaactatcacagagacaaaaaaacgaacactgtatgttctccctcataagtgacaattgaacaatgagaacacttggacacaagaaggggaacatcacataccggggcctgttgtggggtggagggagggaggagggatagcattaggagatatacctaatgtaaatgacgagttaatgggtgcagcacaccaacatggcacatgtatacatatgtaacaaacctgcacgttgtgcacatgcaccctagaacttaaagtataataaataaataaataaataaataaaaaataaactgcttaccatcaaaaaaaaaaagaagtctggaacaaagaagagcgaatgcctcactcacaagatgtgcggaaatgcaagagacccatagagaattgtctccccataatgtataactcacagagtgatataattacatggagtaaagaatataaattatttattatttaattaattattttatttaatagcaaagtgtttagtacatagacatagctcaggaaaagtaactaccatttttactgttatagtaattgttatttttggttttgttgttgctgttaaacattactcaacctatagctggcctgtgatttacctattagcctgcaacttaccttgaccaggaagagaattgatccaaaaccttggagtagggtggatcttgcaagtggggtaaatggccatggctaggtgaaaggagagtaaaagggacatgtggtcattagagacatgtcccttgggaatttcagtgagggccagcatggtcagttatctgcaatctgaggtaacagggtaagtaataaaacaggtagctgctgtcatcatgtaccatggtgatagaaattttagagactgtaatctctgctatttagttcccttctctacccaagctgaatctgaagttttctaacatgacatcccctacctggaatgcctttccctcccctctctaccatctgttttcttcaaggtagcatataatggaagtcctggatttaaattcaagctgtgtaactttccaaaactctttttcaaaatataaaacagaataactgacatttaaatattttgtatttctgctacctagaatgagctgtatgggaagtgataggttttgacatccaggcttcaggctttgaggtccagcttccagtggtcactgcccaggaatggttggcttagaatttagaatataggttttactacttctttatctgcccaaaccgtatggaatttatggtctttgtttagcatcttcacagattccattcttctcatcgaaatacccaaatggtattttctaatagttcaataccctgttgttgccaaaattttcaatctatcccagaagcacatgccaactccttggtgatgggtttgtctacctacaatttaaggacaattacagtgtattcttttcagaagttattattggttattgagtcatttcctagtggaagtggtttttttcttctaggtcctctggattcatcatgaggtatttgctagctatctctttgcacacagcaaaatgtgtgcctgtgatagagtatgactttttagaatgttcactaggctggagttcaagactcaactttgtcacttcctagttctctgggaggcagtatctatgaaggaggaaattagccagctagcatttgaatcctagctattcgtgaactggatgacttctagctgatatcaaacccttgctgagtctcatttttcccatttgcaaagtgagaatgataatgtctgcctggtagggttttctgtgagtagtaaatgaggtacatgtctagtacagtgcttattatattataatgggcattcaacaaaggcgacatccataccagcccttaaggcactaatgaccccaaaagggttgaaatactcacatgcccatggggtccagcacaaaactgaagtgaatgagaataagtaaaacaacactgcaactgtgaaggtacaaggcaactaagagttggcctcaacattggaaagaaaataaggagtacttatggcaaactgaggagggtgtgttttatctaaca

SEQ ID NO: 14 - DNA, 142299 bp, Artificial Sequence
  Description of Artificial Sequence:  Synthetic Primer
  modified_base (1305)..(127835): N = A, C, G or T/U
tcagaagaggtctggtaaaccatccagtcactctcttttgtcacaatcttacgtctggcctttccagctactttcttcttggtgacattgttaaactgcttcttaccaatgtaatactgtccagtctttttgcagtacactaagtaaacgaaaccaaaatacttagcggggtcaatctccccgcacagtgaaatccaatgtccatattcagggcaattgcaaaacctttaatcttcattcataacaggctcccaaccatatttagcaaatgtgaagtcatctttcggattacgctcttgataggcaatccagaagtgctggtgcataagttcaagaggtgttcttgtgaccacttgaccatcccatgattcataagtatatgactctttcttagcgtaaagttcatagatagcatcaagacactctttgtaagtctctttaccttccagagcgttcattacagcaactttccctgcacccttaaggccaaagtagttatctgcgttgtctcctgctacagcttgatagcagaggaatttgaagcctacaccaacagtctttttagctttcggcttagacttgatagggcaatcccaaatattacctacgttaccgtctgcaatgaaaatcagaggggctttctcgtaagtcatatcaatacagtaagttccttccgcttgggaaggtctttatcaatactcataagagcagccttcttacccatcttctcagcttttgcaataacaatggagtcagcttcaaagccacctttgagaagcttaaactcaggtcgtgacagaagatactcacgacaagcaactaaatgcgtaggggttactgattctttacggttaccttgatactggtgttcaagacctttaatgtctttgtgtttatgtacacctttctcagtgaggtatcccatccaagttcgctctttaccaacaactttcaaccattcctgaagaacttgttgagttgccataatagcttctttttcactcttagcttctttccaagattgtctttcccattcatcttcatcgaatgcaagaccaagttcctctgttagaactctctggtcagatagccattgattagcgtctttagcactttcaaaggcatcagactcttcagcagtgagtttattcacatacttgtactttgctttctcaacgacacaggctcccttgtaagcgatactgtcagagtcaataaagacatgtgtcacagtatctgggagttttgtaacgtgtacttttcatttgtatctcaatacgaaagagcccatactaagtcagggcnnnnnnnnnnnnnnnnnnnnnnnnnnnnnnnnnnnnnnnnnnnnnnnnnnnnnnnnnnnnnnnnnnnnnnnnnnnnnnnnnnnnnnnnnnnnnnnnnnnnagagtgtacgcaggtcaagtttactctactgatgatttacacagaagcatcttcactagaccatggaaagactctctgatgctaaatctgagtcttgtgcacgataagaaaattgaagaccccgaggatacaggcaaagcagctacattaagtgttgatgacattcttaagcatgactacggggcagcacgtttcacacctagggcagatgctaatgatgaagcttcagaagtggttgacacagctaaagatttctttaaaactttctcttcaggaagccaacatcaccactatttcagccctcggacaaaactcaactcaatgctgaatactaagtgtgaagatggtaggaagttggcagaaaaggttgacgaggcttcgtgtgcagcaagtgaagtggttgaagagagtcagtttagcagagtcatacgcattatgatgagagctggttgtgcaccttctcaaattgctgaagagattcaacgtcagttctacaacgctatggtgaaagaatgaaaaaatttacaacacttggtgagtactggatgcttgctgctacagaatcctacaggaaagccaaaaagactaaacagtgttatggtaagaaagcggaaggggatattctgtactgcactgtgcatgatggaatgcctcatgttacaccaagaggtaaagctttcaaacgtctgatggatattgagtggaatgctcgtttagagagggtagcaaaatgatttacgaagatagccgtgatgtgatttcttttcagcagtctaaccatcatgtatctctgaagattactaagccaaatggtgaagcaggtgttatctcccacttcggaggtgataattggtttggtacagggtgctttgaaggttacagcaaagaatatctgaaagcattctaccgagattttattaatgactacaacgaacttgttcaagcaaagaatgactgcacaangcagtgagtataaagccagaggttgggctggaactatcctgatgcttggaatcttccttgcgatgatttgtgtaaggagatcataccttttgcaacaacatggctacacctgaaagacattctgctaagtaaaataagctagacacagaaagaatattactgaatcagtccccnnnnnnnnnnnnnnnnnnnnnnnnnnnnnnnnnnnnnnnnnnnnnnnnnnnnnnnnnnnnnnnnnnnnnnnnnnnnnnnnnnnnnnnnnnnnnnnnnnnntggtaccctggtctgagatttccagcctccagaattataaaaattatattctgctgtttgtacatcacccagtctatggtaaattgtaacaacagcccaaactgactaaagtaggtagtaatatggaaagtgggcatgggagagtaagaggtgggcaggctgccatcagagagatgagtgggggttatcagagtagaccaggtaaggaatgcagtctacctaatagagagcaaacatgggtacagtgggaaggttccaagtgtgaccaggagatacactgacagtatcactagcaggacttgacaagtcatcttcacataggggatgtaggagagaccactggaagatcaagaccattgatgcaacatttcaaggccaatttctatagttcattcatttattcaacatgtactacttcattttaacttgtcttataatttgaatcatgaatatgactaagtcatataattttttagagctggaagaaatttagccatcactttacaaaatgtcttattttaaagatgaatagtctgaagactaaagtgtgctgtcggggaaaggactttgaggtcttaatattctatatcaatctctaactcagacaatgatgtgattattgacaaattgcttaattgttctaagtctcatcctctctatgatgtaaccataagcacatctactatgcaggtatagttacatatacatatttactcttactccttcagttcatgattttaagccataccagaaaaaagagagccaacagatttctcaacaatccttaggcaaagaagccctccagtccactactggaaacatatttttgccatattttcctgccctttacttgaaaaattttaactggaaaagacacagtcactttgagtgttgaggtaatgctagaattcagccatgtgccacgatcacaaagtcatacaatattgccaaccttctacagagaaaacaaaaataaccaatttccctttaagcttaatagaaaaagtaatctatttctttttttaagaagatttttttttatagagatggggtcctgctatgttgtccaggctgttctcaaactcctggcctcaaagtgaggcttccacctcagactggcaaagggctgagattaccagggtgagccaccacactctgccataattgatttcttacgttgaaatcaaatacagtgtgttattttcaggcctaactcctctaattagcacagtcgtaaaatctggtcagttcttctggttgttccctcttgcctcaatgggatcggccattatctcttccatgtcctcctcaaagtgcctgcacctttgccccaaagttctgcctgttttcaagcttcctctggctcctgagggcctctctcttggcatctttcctgagtgacatgtccctttccaacctgcctcacttagggcctctagcactactaattcacttactctgtaattcaagagtgaatgagagacttatttcataagttgggtttcatgccttaattcaaaacacaaaataaagcctttacaaggttttgccttcaggttggggaaagtcctgggggtagggcatgttattccttgacttacatcacaacggaaatgaggacccaccacccagaacaccttatgctgtcccctcagggcctcatttgttctccaccctgacactgccagccacgatagtccggccctggctccaccctcccgatagagagtcctcaattcagaaatggccatgagcccacaagcacatttttttactatgaatatgaaaatcgtgaaaacaaatttgattttaggaacaattaaatcacattcttcaggtaagagcattacttaccaacaacagaaaactatcaagccaagagtagacttcagatgagtcaacagttcccagccacggcttttggtatttggcatgcacagcagtgaacccgatgtctgcgactgcaggatgtgacaatgcaaaggggacgctgatccactgcaacagaaagtgacactggagccctaggcgatggttttcaactgtctgatatatgcaagatttgtacacctcacacactgcacagctcagtagttcctctagttcagacagagaaggatcggaaatcatgttctctgttttttgttgggcaccataaaatactgatttagatgaattaaaataacacattgactatttcttttttttttttttttttttttgagacggagtctcgctctgtcgcccaggctggagtgcagtggcgggatctcggctcactgcangtccgcctcccgggttcacgccattctcctgcctcagcctcccaagtagctgggactacaggcgcccgccactacgcccggctaattttttgtatttttagtagannnnnnnnnnnnnnnnnnnnnnnnnnnnnnnnnnnnnnnnnnnnnnnnnnnnnnnnnnnnnnnnnnnnnnnnnnnnnnnnnnnnnnnnnnnnnnnnnnnntatatatatatatatatatatatttttttttttttttttttttttttttttaagacggtgtctagctctgttgcccaggctagagtgcagtggcttgatctcagctcactgcaacctccgccgccctggttcaagcaattctcctgcctcagcctcccaagtagctgggattacaggtgcccacctgtaatttttgtatttttagtagagacggggtttcaccatctaggccaggctggtctggaactcctgacctcgtgatccaccctcctcggcctcccaaagtgctgggattgcaggcatgagccactgtgcccagccaactagtgtgtattctttgatcttagcagccactgaattcttagctctggagcttagtggtcagctaatgattaggtggtttccttaactagcttgaagcaatacattctctctgcctagggaccgcgtttggggtattctttcaaatagtgacaagtctgtggagtaaggctttttgggggagctccaaacctcttctgcccccgccagtatttgctatgctactgtttttcataattactatagttgcaaagctgttggttttcaaggctatcatggagttggagagagggggttgggaataaggcaagttagactgccacagagctcacagtttatcctgaaaattatccacttttcctgaataaacactactttgattgttggaagcctttgattaattcacagagacatgaaaaagttgacgtaaataattgtttcattgttctcactaattttatggaggagcagacatttgaaagcctttactccattattccagaagtgctcctttcctttgttcttgaataatatttttgatgcttatagatttctgggttgaattaaaaaataactttgaagatattgtttcgttttgcttcggcctgcatagtttctgatgagcattcagtagagttctgaattatagttttcctgtttgtaattttctatgccttaattttttttctctttattttgctagccattgattatgctatgtctaggtatggttttcaaatttatccaaattatatttggttgagattcttaaatttgtgaatttatgtggattataaaatttaggaagtttttgagcattatttcttaatatctttaatttttagaaattatctttctcttctcttgtgagactccaattaactcttagacctcttaaatttgtcccactaattcttgaggatttgttaaaaaatattttttctctcttataagtggagaatttctacttacttggtttctacttcactgactcttttttcagtcatatctgctaaatttttctattttttttttatttggagcagattttttcttacctcacttgcagggttataacagccactttaaagtttttgtctgataatttcaacattgggatcaaaacaaggttgcctactttgattgtctttccctttggaatgggttacatattcttgaatcatcatatataaattattttaaattgaatgcttgaccctgtaaatattatatcatataattctggattctcttatattctgaaaaatagtatcgattgcttttaagcagtcagttaacttgattagactcatactgaagttgaaatttcctgtaaggaatgaaaggaggtgaaatttcagatcttaggccaattctttaatctttagctgtatgctgctttcattttattacgcacatctgactcaagggtcagctagagacttaacctgagtttatcagaatttgggattcccttcactcgttctattttagggttttcctctcattggctagtggacctagttgtcctagttcttcatcctgggtcttctgatcagaaaaatggtggatgggcccaacgcggtggctcacacctgtaatcctagcactttgggaggccaaggcaggtggatcacctgaggtcaggagttcgagaccagcctggccaacatggtgaaaccctgtctctactaaaaatacaaaaaaagtagctgggcatggtggcatgtgcctataatcccagctactccgggggctgaggcagaagaattgcttgaacctggggggcagagcttgcagtgagccaagatcacgccattgcactgtagcctgggcaataagagtgaaactccatctcaaaaaaaaaaagaaaaaagaaagaaaagaaaaatggtggatgttctatcagaatttgcactgctccacacccatcttgccacagggaaaaatctacagaagtctctattttggcagcttgtttcaagttttgaacctcatttgataatttgtattcttttgttaatttgtatttttttgttcagtctccagagctctccagtagctgtgttttatatgctgcccagagtctatagctgttatttgtagcaggattggtttgttatatgcttgcttttccatgtaagagatggacctctttggcttgattttgaatctcatttctcctaagattaaaaattaaacatgcacctgtgttctcttgtctccttcctacttctaggactcagctgtaactttggttcaggagctctgctgaagtcccagcctagaatgagactgggggttttgaggatgtgtcagtgccctgctctagacaacctgggaaaggacagcatcttggtctgtgggtgagagaggggcagataatttaggccacccaaatactttaggcggaatgtgagcagattctctactttcagctctcacccctggcttttctataagatgnnnnnnnnnnnnnnnnnnnnnnnnnnnnnnnnnnnnnnnnnnnnnnnnnnnnnnnnnnnnnnnnnnnnnnnnnnnnnnnnnnnnnnnnnnnnnnnnnnnnttgaataagaacggattagacaattgcgaaccactcctacacactagtgtaaccagctaactaaatacgatccctatctgtctacctctactgtctcagtgctagtctatgaagtacaatcttctctcgctcgtccctatactgacacgcacatcaaacctgcgcccaaaacgcatactattctaccgcgcgtggctcttcatacatacactggcactgtatgtgtctcactttctctcggcttgtgaggcaactcaaataatatgagtcacctcacgtcttatgtatatatatatatatatatatatatatgtatttacactagtcaaggaaagtcattaaactaacagcaacaataacaaaagcaagagaaaacggctacagcaaaaaccctggggtggatgtctccagcagagcatccatgttatattatttaaaatgtccagttttcaacaataaattttgagacatgcaaagtgaaaggaagtatgggccatacacagggaaataagtcagtcagtaaaaactgtcccagaggatgcccagacagtgtaaacatgaaagaaagattttaaatcaaccattacaaatatggtcaaagaagaaaagaaaacaatatctaaagaattaaagaaaagtttgagaatgatgtttcaccaaataaagaataccagtaaagagatagaaattagattttaaagaaacaactacattttaaagaaacaactacaactaaaataaatattaggatatcaaattcagaaatatgtttttaaaataatgaagtatcacataagtaaagttggtttaacattcggaaatcaatcagtgtaattcaccatattaagagattataggagagaaatcatattatgaacgcaaaagacaggagaaaggctttgacaagattaacagacatttgtgataaaaactcttttcaaactagaataaaaagctttccatatttaataaaggacatctgtaaaatatccactgcatattgtagttaatggttaaaaattaaccaattggacactttcttgcttaagaatggaaacaaggtaagaatgtatgttctcatcgcttctattcaatattgtactaaatagagtaatatttagagaactaaatatcgtactatgtttagcagtatctcttgtccctatcaactatacatcaatagcaacctctaagtcattataaccaagaaatgagaaattgccaatgtcctctggggaggaatatcacctccagctgttaatcactgcagtaatgcacaaaaacaaaacacattacaaattaaaagatgtcaaaacatccccattaggcagatagcatatttgtttacataaaattcctcaggtatttacacaaaaatgctagtgaatttagcaaggtcactagatacgaaggtagtatataaaaatccattgcattatactttagaaacaaacaattagacattgaaattagaataacaacttatagcatgacagatacataaaatagttattaacaataaacataacaaaagatgtagaagctttctctatggggtattgctgaattctacatgtagaatattgctgacagaaattaaaggcctaaagaagtggaaggaagtaccatgttcattgattagaatggagcaagccaatcagtcattcccacaatatgaaaagttatatttatataagaaaacttattttaaatttccctaaaattgtcttatgagatttgattatgaaatgcaggtaaagtacttagtatagtatctggcacacagtaagcatgcaacaaatcttacctattattattatttaattcctgctttctctgccataaaattccatctgtttcttccagcattagctttcatttttaaaactaatagaaacttctacttccatatatttttttgaaaatcttcctgaatctgaacagatagacttttcccaccttctgcacgaacttggaacacagaatgctagagctggccatataaagcagctaattaattccatgactgagtaaatgagttgttctggcttcctttacaggtagggatgaatatcgtaacaaaaatcagccacatctcccttgtcgcatttcttggctactaatctccttcagggaaaaataaaataaactcaaagtatggttcttatgaaccagaagcaccataaagattaagaaacaaaaaaatcttaaaaccacttttacactgcaatagtattacataaaaattattattcagtgcataagtaaaattagacagtgaagaaaatctacataaattaaatacccacgggtttgaaccaatagcccacaaatgtttttataccttgatttttctgaatagaaacccaagtttgataagacactatttcccacctctttatagagaatagcatttatggagtctggtcttataataactaatttcacttcctgaggattttctacatgtgatgatgaggtaaaattatgaatcaatatttaatatgaaaaggtgaagagaaatgatactgtcttaataaaataagctaaaacttggagaaggatcaagaattcagtcttactcagcctttcttgggaccctcatttgaccttctcaagaaaaccgaaaagaaacaagctgtgatgggtaatttcttttggagctaagtaatggagccattatgcaatgataaatcaagggaagagtcttttccagtaatgtgattagtaatcccagggtcagaggcagtggcaagcagaggatctaatgacgtaagtttatagccttcaaggcctaatcacgcctgctactacactggctcaaatggtatcatttttattatactagcaaccaaccaaccagctaggtcaaaagggggaaaaacaaacctggggcaattgtgtttggccacaaataccttatttggtttggtggcaattgaataacaacatctctggtgagctgctaatgaaatcctcttctcttagcatctaatcaaaattcacagccagaagcaatatggaatgaatattccagctaaaacattaattattctggtgataaaactgtctccacagtgggcttcaagcaggcacattctttgtgaccagaaatgcttaaaacatcatgttcaccctttgatgtctgaacgcttcaaattaggaaggagggagggcaagtaagccatctattccccagcagggcctactgggcagcatgaacatcagagagagcaaagcatgtgcatttatagctcttgtccttcaaactctggggaaaatgacactaagatttcaaaagtcatgagcataggaactaagcctaatttaaaagattaatagttttatccccatttagttaaccataagtagattgtagttgttctatataatttacctgcagaatactagtatttgttaaaatcagaacaaccttacaactgttcattaattgtaatgttttctctaaatgtagaagtgccattggcaaggccatgaacataaagtatcacaggcaccaccactgtcagaaagaaaacacgtcagcactcttagtacttgcagagttctgggcatggtgatctggagagaaattcaatataatttacccaccatctggcctatgttctgcttgttttcttatgacaactatacatggctttcatgtattttaaaatgttcatgtcattttaagaacaaccatgttgtataatttaaggccagtaagtaatggtagatgctcagagtcctggttgggaaaagattagtttaatattaatgacaataatattaataacaataattagtgagcactggtgccagatactttagtaaatactttacatggattatataatttaatcctcatattgaccctatgataggcagggcactgggctcatgcctataatcccagcacttcaggaggctgaggtaggagagccgcttgagtccaagagtacaagaccagcctgggcaacatagtgggactcccatctctacaaaaagtgttttttaaaatattagccaagagtggtggtggtacacacctggggtcccagatattcgggaggctgaggtgggagggtcttttgggcctgtgagtttgaggctgcagtgagccatgatcgtgccatgcactccagcctgggcaactgagtgacagcctgtctcaaaaaaaaaaaaaaaaaaaaaaaaaaaccccccggttgaaaaaaaaaattctttgtgcttttttacaaaggaaaaaaccacctgcttaaaaaaatgggcaagttgggcccccaagccaaaaagccaagggactaatttaaaaacctttggccaaatgggttcagggttcatttcccccccccccccttgaaagaaaagttgccgcaaaaattggtctaactaaagggccccggggtttgacccctttccgggggctttaactttttgaatccccccaattccgggggggaatttaattccattattattatttttccccttttcccgacccggggaaaatgggccccaaaggggcttttgtgtgcccacaggcccaccagctgtctgagaccgaaattttaaaacccctgtggccggggagcccgtccattggggtgacctttccaaaaccattatcctttacttcccacaaaggtcccgtggggttcccgggannnnnnnnnnnnnnnnnnnnnnnnnnnnnnnnnnnnnnnnnnnnnnnnnnnnnnnnnnnnnnnnnnnnnnnnnnnnnnnnnnnnnnnnnnnnnnnnnnnntttcccccgatttggaaaaggattatttatccaatgcccatatccccattgtatctaggaagtaattaacttgcttttgattttaaaggctcataggcagaaggaacttgccttgtctcaaatgagactttgaatggtggacatttgaactaatgctgaaatgagttgagactttggaggactgttggaaaagcatgattggttttgaaatatgaagatagatttgggaggggccagggcagaatgatatggtttggccatgtgtccccactcaaatcccgtcttgtgtctcccagaattcccaccagttgttggaggactcagtgggagataattgaatcatggtggtgggtctttcccatactgttctcatgctaggtctcatgagttctgatggttttaaaaatgggagtttctctgcacaagctctctctttgcctgctgccatccacgtaagaagtaactttctcctccttgacctctgtcaaaattgtgaggcctccccaaccatgtggagctgtaagtccaataaaactctttcttttttaaattgcccagtctcgagtatgtctttatcagcagtgtgaaaatggactaatacataacaccagagaaatctaatactttaggaatgaagagcatagtaaatggtaaatatctgaatcaatatagtaaaatatatttattcttctaagttttaaaaaatgtatatgacagttggcaatttataccattgtttaatagaagttccaatgtgtgtggatataatacatatagcaattatagcataaagggagaaaatgaaagtacccatatgttttcaaggttctgcattgcacttgaagcagtaaatattacttctaggcaaactttgaaaagttaagttgcaaattgtaatcaatcactaaaaatattgcacaaaaagatacaaatagccaatagataaatttaaatggaatagtgcataatattcaagaaatacaaatgacataatggaaagaaaaatagatgaaagaaaaacaaagaaatcaaacaaaataataaaatattagaacaaaatttaacaatgctaataattatacttaatgtaaataaagagtttaaacacatcaactatattgaatttaaaccaaaacaaacaaagaaaaccatccactatattcaagaaatcctatcagaggccttctttaagtattatgatatagatatattgtaaaaacagaacaaaaagagatgcaattaaaacactaaatcaaataaaactagggtagttatattaataccaaaaaaagtagacttaagaagtagaaaaactgctaaggaaaacaagagacattacataatgataaagggtcaatttcccaagaaaagcaatcaatgtaactcactatattaacagattgaaaagaaaaaccacataagtatctcaacagatgtataaatacgtttgaaaaagactaatatatttatataataaaaacccccagcagactacaaataagagaaaattgccttaatctgataaaaggaaactcaaaaattcatatagatgacatcgaacttaatgctcttcccttaagttgaggagcaagcaagcatgtttactttttatacttctattcaacatcatgaattctggccaatacaacaaagcaagaccaataaaatgtatacaaaatggaaaaaatacaatttttcctattcacagacaacataattattcatgtagaaatgttcaaggaatctaccaaaaaaaccattctagaacaaataattgaatttagcatggcttcagaatacaaagtcaacttataatgcttgcttatattcccacatacttaattctaaattgaagaattgtaaactaaaattagtaaaaccgtaccatttattatagctcaaaattagttaggtgtaaatacaacaacactcaaggggacttcaaaatgttcatagaaaaaataaaatcaaaagataaaaataaaaaatataaactttatttctctacatatgctccatgaacattaagatacttgttaatgattataccaaccaattacttcattcctaaagaaatgagggtcctggaaatttaaccatgtctgtgctgtcttttttacattattaactgaagaaaaatggatgcccttgacagatgttttaatatttgggaaacaaaaagaagtccacaaaagccaaatcaggactgtaagtgaatgcctaataattgtccaccaaaactcttgcaaaattgaccttatttaatgagaggaatgagcagaagcattgttgtgatagggaagcactctctggtgaagcttcttcaggtgcttttctgctaatgtgttggctaactgtctcaaagcatattaataataaggagatgttattgtcctttgaccttccagatatgcagcaaaaaaaaatatcttgagcaagccaaaaatgtgttgtcataacctttgcttttgactggtccactgttgctttgactgaaccacttcctcctcttggtagccgttgttttgattgtgctttgtcttcaggatcatactgataaagccacattccatctcctgtgaaaattctctgaagcaatgcttcaatatcttgatcccacgtgtttaaaatttccatagaaagctctgctcttgtctgcagctgatgtgggcccaatggttttggcaccatttggcattcaagtaggttaacaggaagaatactgaaggagaccatttgcgcttctccttagttaccagatctgagcattgtgttaatgatagacataacaccatgtattctccactggttaaaggcatatgctctatcaagtggaatgtttgttcaactttggttttttagttagaattgtgtacagtgaaccagttgagatgtttctggtgttggctattgtttcacctgccagtctttggtgcttttcaattacagcataaacaagataactttttttcttacaagctaatgtgaatgtagattgtctgctgctgtgaacttcatcttcaaaatcatcttgtcacttcttacagtgagttaaccatatataaactgctgatttttgaggggtcattgtgcctataaactttctataaagcaacaatgatttccacactctttcatccatccaatcttcaccacaaatttgatattttttcttgcttcaattttagcggaattcatattgttctgataagaatgctttccataggaaagttgttcttgtccttcttagtgtctcaaactagatcatgttcaaaaatgctatattacattaataagagtttattttggtgcaaaaaattgataagatgcatttttcattaaccttttgaagaccccttgtatgagcaagatctacatgctgaaaattaatacatactgattaaagaaatcaaagacctaaataaatggaaggacatgctgtgttaatggatcagaaaaattaatatagtttatttaacaactcttcaccaaatttatactgggttatctcgattacaataaaagtctaagcaatatttttgtagataaactgattttaaaatgacatagaaaagcaaaaaaaatagaatagtcaaaatgttttcaaaaagtagaataatgttggaggactcacattaccagatacaaaacttcaatagtcgacattatgagcaaaaatatagataccagagtccagaaatagatccacagtaatatggtcgattgttgtctaataaatttacaaaaaataatttaatggataaagataatcttctcaagaaatggtgctggaacaatgggaacacggatggcaaagaaatagcatgagacaatttggggagatgatgtgattttctgtgttctcattgtggtggaggccaaatagcgctatgcaggtattaaagctcataaaactatgtatcagaagaagtgaatgttattgtatacaataaaaaaagcacttgagctattgtctataaaacagctactgtataatggaaaggatccagaagaaaaaaaatcaatttcagctctattgcttcacgtttacgaatctggacattttgacagttctattcttattttccttatctatgaggtagaaacattaatatatttctctgaatattggtatgagtgtcatatatgagataatgtgtataaaagaagttcatataacaaataattatacaaatattgaatataattgttataaaatatttatcaaaaaaatgtaaaagagaatattgaaatacttgtttaaggggtatattatttaaagtccaagcaggaaagagactgcacattaactgcataattttaggatagtttaaataagtgactattcacaaagatgtgtgcagaatgtaggaaaaccacaaggactctggagccagcaacaatcaaggggaatgttgataggtaatgtcaatgctgtcattcgacacttgaaatctcaaagccactactgttagaaaggaaaacagaaaaagttcattaacaggaaacagctcttggagccccagtcctacagctgctcatgcagcctaaattggtggtcattgcagctgcannnnnnnnnnnnnnnnnnnnnnnnnnnnnnnnnnnnnnnnnnnnnnnnnnnnnnnnnnnnnnnnnnnnnnnnnnnnnnnnnnnnnnnnnnnnnnnnnnnnctacatgcttaaagaaatgcgcaagttaggtcacatagctaggaagctaaggaactaagttaataacctatggccaaatgagttcagagttcagttcatctccaccctcttgacagataagtagcagcagaaatgagtctaactaacaggcactgagtgttgacactgttctgagtgctttaacttattgaattcccacaattctgagatgaatattaattctattattattattatttccattttactgaacagaggaaatagagacacaaagagactattagttgaccaaggtcaacacagctgtctagaactgaaattttaaaactctgttgtctgtgaagtccgtactatttggtgaactatttctaaaaccattattctttacttactcataatgtttcccttggttttctaggcaattggaagatgtatgaaattacctttttgtgtggtatgaatttcagggtagtctgtaatttatttttatgggaataaaatgactggggatcaaaaataaatagcctaattattatttaggtaaaattagttataattagtttatgtgaccttgatgtgtcttttcatttttcctgaacttgatttccttggttataaaatgaagggtttatactaggtgacttataaggatcctacaagtgaaaacttatcaatcctcgcccttcttctaagtatatgagtatgtgagcactcaacctgttacaaatttttttttctctaaagtcaaggcaaggttagctaactttcttattgaacgctgtttacctatgtttaggggctaacctgatgttgtacttctgaataggtaaagctttacttccagggaatgtcctagcagaaaaatacacattacctttcctgggaatcacttatggtgtatttgcagtaaaaggccagtcaacagacctttccctccataagccttgaagaaaatcattagcattaattaaccatgggaaagtggactttacaatattaactttcaaaagcatctgtggaaataagttctgatattcaagcacgccctcatttcatagatatccttaaactgtcttctaaaagctaatttacactgggtggctcaggagatattccccaagaatgggtacaaagagcaagacataatcacccttgggcttaggtagaaaaacgaatctcagaaaatgatgagtaggaatgtgtttgagacagtgaggctataaaagacatacttcccactgattaagaaatttgcttccaagaagagctgtactccaagagggagttaaagacacttaaaggcaagtgtcattatttttgaatgaagaagtacacgaaagctatctatggcgactaatttcttaaaaagcatgtttctattctaaaactattccaagagtgaaataaatgtttgcattttctacagaagtccaagaaaataaccaaaatacataaaacaggcgattggttgattaaatgtgccaagaccatacaatggaatgttgcacaatcattaaacttaatactctagaaatatttaatagaaagatgttcactatttatttggatttaaaaatatgtcccaaaacaataacccagtgatagtgccattttccaatgtgtgagtgtagtgcgtttaagtatatatgccaatgtgatagctgactacttattatcttcttagtttatgagcattttataattttttggtaataagcatgtattaattctttaatgaaagcaaatatatatttaaagtagcctaagaagggagatcctgtgtgcaatcaacaagacataatatatctcaaaaggcacaatttcttagattagggatttgttgctgtacattgaggctttccctggtgaagctgttctgagcgctgaaccacttctgctaggctgtcaataaaaaacccctgcttggtaggcttaatatgatccacctttggacatccacacaatagctgagtgggacaagtgttcattgtttatctaagcagggagtcttacgctgactatggctgtctctacgtcagcgttgtaacagctctgggagtgaagaattgttatgacatggcttttcaaaatggcaaccataaaataaccacttgaactcacccatgatacttaaccctgtccctggcaagatcagatttacagctggagccaaaaagtctgtagtttctctcctcaaatcatgctttaaaaggagagagcagattagagatcaaaatgtggaactctgggaacacacatctattaaataccttattttgttagcggcagaagtattagtgaccagaaaaatgaaagaaagcaagacagaagccaccatattaaaatatatcctaagacagctttaaatccattagagaaaaaacacaggagaaaaaatgtttggctgaaaactcttcagatttatccttttgaaaattattcttccaaaatgtgttctcattttctaaatgaaaataaagtaataaaattcaggtattactaaacaaatgctatataggcactcaagtaagatataccatacaactccataacagtcaagctgacagcattgcacaaaggcaggagtgcttcacagcaggctgaatagatggcagctcctggaattgggcaacatgacagcaccaagtgaccttctgtatccatagtacattacagagccgtttccccacttacagattgtatttggtttttagaagtacccggtgaagcacatagagaaatgatgattgctcatatcccatttttcaggtaaggatgctgaggttaatgaagtacccacaaccagaagcactcagtgtttgaaaatgagatttttgactcccaggtgaaaatatctaactctcaaaaacacgtaaatgccagtttagtaaattattgttctattacccattatataaaacaagaaaattcttgagttttttaaaaaattaaagttctagaatgttttcgcttcctgaatatctaccaccttttttattttttccagaaaacagtttctttatatttttgaggtaaaatttatataacataaagttattcattttaaagtgaacaattcagtgacatttaatacattgacagatttcccccaccagcacctgtatgtacttccaaagtattttcattacccaaaataaaactttatacccattaaacaattagtctcttccccccacctttctgcgttctatgtttatgaatttacttactttggctatttcatataaataaaaggatacaccatgtaaccttgtgttaccctctaacacatagctggggaggagggggatgagaaattctagttaatcgttttccagggagataatatagccctcaactaggacacggagagtgagagatctctgtgtcttcagctgcacccacacagagtggagtttccattgtattgagctgaaagagggtaataaagaggtgagtcataattcaaatcccagaaactccaactattcttaccaagttgtagtaaatgttcttttaaaaaagcttctgcatttgtatatgcttttaggacgatctccagagaattaaatggttgtttgtttcatgttaattttattagttatgctaattttacagaggaacgggacaacagagctctggtcactttcattgtgaagtagaactctgctctttgctgttttgatgctggaaatgtacctggttatcgagcagacccaggtaaaaaagagtatcacaaaatatttggaattgctaagaaccttaaaggtcagctaatatactaactcaaccatcagtattttttacagattttttaaagtggatatttagaaacaataaggagcatcctagccacacagcaatttaatgccaaatggaagagtaaaaggaggtcatatatggggaaatttgtagattccaccttaaaaaaggtgctatatttatcatgcaataagtttatttcttatcctactagatggtttatgtgactttctagactcaacttcccaagtggctcctgagtggcttctttttggtgccctggtgtaccaaacagtgcatttgttattagcttcaatgcgtgaggcacaactgaaataaaaccggtttaaattttataaggaaaggtgcagcagtattgtagagttgtttcttttatgagcactcataccctcacacatataatttgcatgtgtattttaaatacaggtatgttatattcataggaagatatagacatgtaaaaataacagggtggctttttttcatttctcataggtccagaaaaaataacacatttaaggaatgtttaaactcataaagaacaattatgttataaatgtgtattcctaaaggataaattaagaatttaatgttaagtcatgaatctcagtttaatattataatactatttttagtatgatccctaaaatatttatctcaatatccaatagatcaaaacagaatgcatcaatgtattagtcttttgaaaagtagctcaaataagtcactcaatgccaccaggatgtttgtgaaataggacagtaaaaatgaaaatattttggaaaatgtataataaaatgtactctgcctaataaaaatatcctgccgagaaaaaaaagcatattgaagatctacatgcatattttaaaaatacttctagttcataggattaaagagtcaaagaagataaccaaaaagttttgtcttctctgctgagtaacacttccagtgagccctgagagttctcctttgctaactttacagaactgtggtaaaattaagatttctgcattcttcagttgaagatttatgtagtgggcttctggccatgttactacatgattgcataaaatgaaaacctatcgattctaatttatgttcatattatccaacttaaaaaattacctatcctgatttcacttgaaaaggaagaaatttctcaaatgtcacagtaaagattactgtaacaataagacagcaacttcaaaattttagataaatttacttattttcttctgcctgaaggaaagagaaaaagagaaagagaaaataaggtactgcagatgaaaagctccactcactcatctgttcatgtcttgaagttgtaaatattattttatatatcttaatgcagaaaacatgtgaacaaccagccaataacctgagaaagctatctggacttttcctcagaattgtctggctctgtggctatgggtttgtgtttcctagaactgtatatttattttgcatggccaggggtttcttgtgcctcaggaaagccataggacacagaggatcacatggtaatttacactgtttgtcacaaggaagctttggataaagatgctctttgatatattagacagggagtgagtgggcttgacacaactggcagggaagaaataaatgagacaaagttttcatccgtgtttagttatggaaagaatccagaaactttcaaaaaataaaatctgtatatcgatttcatattgtgagatcaaatcttacaaaagtcaggcagccatctagaaggcttgatgtaggctatgagaactcactggaatccataaacaggtggtctatgacttccttagtatcatatgtaaaatgtgatgtgttttgtatatatgctaatatttccacagggagagttcatgtcttccatagtatgcaactcagagagttccatgatttattcaatagttggtccctactctgtgccatgctagacactgggtgtgcttgtatctattatctctttttgttttaaaaaaaaaaatccccaggctcattggcttacagtggtacattaggtctttcttgcactgcttcagtgaaatacctgagactgggtaatttataaagaaaagaggcttaattcactcatggttctgcaagctgtacaggaagcatggtgctggtatctgcttggcttctgggaaggcctcaggaagcttacagtcatagcagaagccaaaaaaagagttggcatatcacatggtgagagcaggagcaaggggagagggaggtgtcacacacttctaaacaaccatatctcatgagaacttacgtgagaacagcaccaagccatgaatgatcgatccccattacccaaacactttccaccaggccccacctccaacactagggattacatctcaacaggaaatttggaggggtaatccatactatatcattcttcccctggcccctcaagtctcatgtacttctcacattgaaaaatacaatcatcccttctcaatcattcttcaaaagtctcaacttttgcatttcagcgttactcaaaattccaaaatcctaagtctaaagtttcatctggaaatgagttatttttgcctaaaaatttgcaaaactgaaacaagttatttacttccaagatacaatgggagtacaggcatttggtaaacaattctattccaaaaggcagaaattggccaaaagaaaggggcctcaaggcatgcaagtctaaaacctagcagggcagtcattaaaccttaaagctctgaaataatgtcctttgactccatgtcccacatccagggcacactgctgcaaagggtgggctcccaaggttttcagtggctctgcccctgtgtctctgcagggttcagtccctgtggctgctctcatgtgttggagctgagttcccaagacttttccaggcacaagatgcaagctgcccatggatatacacttctgtggtctggaagacctggcctccttctcacagctccactaggcagtgcccagtggggagtctgtctgggtcctctgacccccacatttctccttggcactaccttagtacaggttctctgtgagggctccattcctgcagcaagcttctgcttgggtcaccagactttttcatacaccccctggaatctaggcagaagctgcgagtccttcttcactcttgcactctatgtgccttcaggcttaacaatacatggaagctgccaaggtttatggtgggttgtactttctggagcagcagcctgagctgtatccaggaccctttgagcctcagctagaggcagaatggtcaagatgcaaagagcaacctcctaacctcctggtgtggtatagaacagtggcaccctgggccacgttcaagagactattgggttctccttggcctctggggtctgtgatgggaggggctacctagaagatttctgaaataccttcaagacctttttcccattgtcttggatgttagcccgtggctcctttttagtcatgcaaatctctctagcaagtggttgctctataactctcttgaattcctctcctgataatgcttattttttctctgccacatgtccaggctgcaaattctccaaactttgatcctctgctttccttttaaatataaatttcatctttaagtcattttttgtctcccacatctgagcataggtttttagaagcagtcagaccacatctcgaatgctttgctgatggaaatttcttccaccagataccctaagtcatctctcttaagttcatacttcaacagatccctgaggaatggagataatacagccaagttctttgctaaggcacaacaaggatgatctttgctccagttcccaaaaagtttctcatttccatctgagacctcatcagcctgaacttcacagtcaacatcactatcagcatttcagttactaccatgtaacagtctctaaggatttccaaactttccctcatcttcctgtcttctgagctctccaaactcttccaacctctatctgttacccagttgtaaagctgcttccacattgtcaggtatctttataataatggagggatgacctaacacaaaaattggtatcagaagtgagttattgctgaaaagaatcagatcttgtgaaaactcattatcctgaagatagcacaaagccataaagggtctacccacatgatgcaaacacatcccactaggtccccccctccaacactggggattacatctcaacatgagatttgaaggagacatccaaactatatcaagcagtaagcatttactttttcttatgaatctatgtgtcacctgggctgtccttacagcatttctcatgtatttgtggacagctggtatgctggctgaaattgcgaggtttaggacagcctcccacacatgcctggcagttgtctgctgggggcaatggtagtggctgagagattgcatgcctttcatcatccaacaggttagcttaggcttactgatattgcagtaacaggggtccagaaaaagatcaaagcatgcacagcattttgaggtctaggcatgaattcagaataccatattgtgcctttttttttgccagtgcaagtcacaagtttagcccagattaaagaggtggagaaacatagtctacctcctgatcagagaatgttcaaaatcacactgcaaagagcatgatacaaggagtaaaaaatcaagggcatgtgtgcataaaaatcaagggcatgtgtgcattctcccagtgattgttcaaaaattggctttagttgattaccatgccttttatccacaccattgccagagtctcatcatgagcacattgcatttcctcagtctggctttattgttgcccatgtaccttgatttggctataacatgcaggtggaagtccaagtgtgtcaattctgaacctaggccttaggaaaacttgtctgttctgcttgtccgctttttattatttttatttttggtgggtacatagtgggtgcacatatttatgagttgcatgagatagtttgatacaagcatgcagtctgtaataatcacatacaggtaaatgggggtatctatccccttaagcatttatcctttgtgttacaaataatccaattatacacttttgttatttttaaatataccactaaactatttttgactatagtaactctattgtgctgacaaatactagctctcattcattctttctatttttttttttcccataagcatcccagattccttacacactcccccacacttcccagcctctggtaaccaaatctctactctttatctccataagtttaactattttaattttcagttcccacaaataagtgagaacacatgaaatttgtctttttttgcctgatttattttacttaacaaaatgacctctaattctatctatgttgttgcaaatgacaggatctcattttttaatatggctaaacagtactccattgtgtatatataccacattttccttattcagtcatctgctggtggacacttaggtggcttccaaatcttggctattgtgaacagtgatgcaataaacttgggagtgcggatacctcttttatcatactaattttcttatactaattttttaaatactaatttacctcctaacatacatacctaggagtgggatttccagatttcgtggtaggtcgatttttagtctttcgaggaacctccatactgtgactccacagtgaccgcactagtctacattcctagccacactgtatgagggttcctgcttactacgcacccgtgccagcatgtggtatggccgactcagattagggatgtgcgcatggttgtatgctccgtgggttgcaagtgtgccttatccacaccatggccagggtcccctcaagggacagctcgtatatccacactccgcgctcaacctgtggggcaagtccctggattgggccaagaccctgcgggggaaggtccaggactttaatcattagctgcgaagattgtccccaccttgggcannnnnnnnnnnnnnnnnnnnnnnnnnnnnnnnnnnnnnnnnnnnnnnnnnnnnnnnnnnnnnnnnnnnnnnnnnnnnnnnnnnnnnnnnnnnnnnnnnnnaacagaatatatgatttttatttgcttacatctaaagaggatccttgaaggtattaaggaattcagtagaaatctgttataaatagcaggaagaaatatataatggcaaaaataaaagaaaggaaaaaaagctcagagcacttgtggtctacacacctgtagctgaaatctggactctccaaggtcacaatcaaggtgccagccaggtctggagtgtcatctgaaagctaaactggagaaggatatatttcagcccttgtggctgttgagcagacttcaggttttttgtttttttcttcaaattttattttaagttcaggggtacatgtgtaggatgtgaaggtttgttacataggtaaatatgtgccatggtggtttgccacacagatcatcccatcacctaggtagtaagcctagcatccattagctattcttcctgatgctcctcctctccctgcaacaccctgatgggccccagtgtgtgttgtttccctccctgcgaccatgtgtttccatcattcagctcctacttaaaggtaataacatgtagtgtttggattttttgtttctgcagtagtttccagaggataatggcttccaactctatccatgtccctgcaaaggacatgatctcattcctttttatggctgcagagtattccatggtgtatatgtaccatattttctttatccagtctatcattgatggccatttaggttgatttcaagtctttgctattgtgaatagtgctgcagtgaacatatgtgtacatgtatctttataatagaatgatttatattctttggggtatatacccagtaatgggatttctacttctaggtctttgaggaattgccacaatgtcttccacagtggatgaactaatttatactcccaccaacagtgtaaaaacattcctgtttctctgcaaccttgccagcatatgttgccttttaactttataataatcatcattctgactgacatgagacagtatctcattgtggtattgatttgcatttctctaatgatcaaggatgttgaactttttgttaatatgtttgttggccacatgtttgttgtctattgagaagtgtctgttcatgtcctttgcccactttttaatagcgttgtttgtttttttcttgtaaacttgtttaagtctcttgtagaccctggatattagacttttgtcaggtggatagattgcaaaaattttctcccattctcatggttgtctgttcacgctgatgatagtttctttttcatgaagaagttctttagtttcattagatcctatttatcaatttttgtttttgttgcaattgttttttggtgttttcatcatgaaatctttgcctgtgcctatgtcctgaatggtattggctagattttcttccagggttttatggttttgggttttacatttaagtgtttaattcaccttgagttaatttttgtatacagtgaaaggaaagggtccagtttcatttttcagagcttgatattgatctgttcagggattcaacttcttcctggttcagttttgggagagtgtatgtgtccaggaatttattcctttcttctagcttttctagtttatgtcatagaggtgtttgtagtattgtttgtatttccatggggtcagtagggatatcccccttattatttctgattgtgtgtattgattcttctctcttttcttattagtctagctaagggtctatctattttattgatttttttcaaaaaaacaagctcctggattcattgatttttgaatgtttttttgtgtctatatctctttcagttcagctctgatcttggttatttgttgtcccctgccagctttgggtttgtttgctcttggttctctagttcttttagttggatattacattgttaacttgagatcttctagctttttgatgtgggcatttagtgctataaatttccctcttaactctgctttagctgcatcccagagattctgggacattgtctctctgttctcattagcttcaaataactccttgatttctgccttaatttcattatttacccaagagtcattcaggaacaggttgttccatttccatgtacttgtgtggttttgagtgaatttcttaatcttgagttctaatttgattggactgtgatctgagagattgtttgttatgatttcagttattttgcatttgctgagaagtgctttacttttagagtaagtgccatgtggcaataaaaataatttatattctgttgaatttgggtgaagagttctgtagatatctatcaggtccacttgatgcagagctgagttcagctcctgaatagctttgttaattttctgtcttaatgatctgtctaatattgtcagtgaggtgttaaaatctcccacttttattgtatgggagtctaagtctcttcataggtctctaagaacttgctttatgaattttggcactcctgtattgggtgtgtatatatttagaatagttagcttgtcttgttgaattgaagtctttaccattatgtaatgcctttctttatctttttaaaatttttgttggtttaaagactgttttgtcagaaaatagaattgaaaccccttcttttctgttttccatttgcttggtaaattttcctccatccctttattttgagcctatgtgcatctttgcacatgagatgggtgtctcgaagatagcatatcaatgggtcttggctctttattcagcttgccattctgtctcttttaattggggcatttagcccatttacatttaaagttagtattgttatgtgtgaatttgatgtgtcatcatcatgctagctggttattttgcagacttgtctatgtggttgcctcatagtgccactggctggtctctgtacttcagtgtgtttttgtagtggctgataaccatttttcctttccatatttagcgcttccttcaggagcacacagggctggtggcatgcaggagcacacaggagcaagacaggcctggtggcaatgaattccctaaatatttgcttgtctgaaaatgatgttatttctccttcgcttataaagcttagtttggctggatgtgaaattctgggttggaaatttttttctctaagaatgttgaatattggccaccaatctcttctggcttatagggtttctgctacgagatgtgttgttagtctgaagagtttccctttgtatacaatttggctttcctctctggctgcccttaatattttttctttcatttcatccttggagaatctgattatttatgtgtcttggagttatcctctcatgaaatatcttactgggattctctgcatttcttgaatttgaatgttggcctttcttgctaggttgagaaatttcctggatgatatcccgaatgttgacctttcttgctagattgaggaaatccctaggtgatatcctagattatatcttgagccaagagattccagcttggttccattctccccatttctttcaggtatcccaatcagtcataggtccagtctctttacataatcccatatttctcagaggttttgttcattccttttcattctattttctctattcttgtctgcctgtcttatttcagaaatataattttcaagctcttagattcttttctccacttggtctattctgtcattaatacttgtgattgcattattaagttctcgtgttgtgtttctcaactccatcaggtcagttatgttcctctctaaactggctattctggctatcagctcctatattgctttatcatgagtcttagcttctttgcattgggttgcaacgtgctcctttagcttagcaaagttcattattatccaccttctgaagcctacttctgtcaattcatccaactcagcctcagcccagttctgtgcccttgctggaaaggtgttgtggtcatttggaggagaagaggcactctggctttttgtgtttacagcatttttacattgatttcttctcatgtttgtgggcccatctaccttcaatctttgaggttgctggcctttgaatgaagtttttgtggggtcttttttgttgatgttgttttctatttgtttgtttttcttttaacagtcaggccactctactgtagggctgctgtggttttctaggggttcactccagatcccagttgccttggtgtctcatacctggaggtattaccagtaaaggctgtgaaatagcaaagatggcagccagctccttcctctggaagctctgtcccagggggatactgacctgttgccagccctcacacacctgtaggaggtgactggagacctccattgggtggtctcacccagtcagaagcaatgtgatcagggacctgtctaaaggcacagtctagctgctttttagtagagcaaagtatgctgcattggtggaggacccttcctcattcagactgtctgagtctaccaaaccacagagatggcagctgcccctccctggaaagctctgttccagggaaacatcagagctctgtgggtagaactcttgctggagtggctgaagcccccacaggaaagtcccacccagtgaggaagaatggattcagggtcccacttaaagaagtagtcttgccaccatttggaaacgcagatgtgttatgtcatggaagactctttttcatctggaccatctgtattctccactgctggcaggctggagtgtctgagtctactgaaccacagagatggtggctgccccttctcctggaaactcagacccatctcaggcagactccaacccactgccattggctggctgggattccaagccagtgggtcctaacttgtgacgttttgtggaagtggggcctgtggaatgacactgctttgctccctggattcagtccccttctgagggatatgtacagatggatttcccaccttgcccgggatcttaaggctggcacatgtaaaactcctgggttttggtaggtgcccaagcagctgctcagctgagactccacacagttcctcaccaacccaaggccctggtggcatgggctcatgagggaatctcttgatccgtgagttgcaaagacccatgggagaagcatggtttcctgggcagggtcacacagtcactcaccgcttccctttctggtggtgggggttcctttggctccatgccactcccatgtgggctgttattcttccttgctcttcttcatttttcatgggttgagttatttgcctagtcagtcccaatgtgagaacctggatatttcagttgaaggtgctgaattcacttgccccttttcattcttctctgggagtgctgcagaccacagctgcttctgatcagccatcttaagacttcatttctttaagggctgttagacagagggcctccattctcacctgaccctgggtcagaagccactctcctttcctgaacacttggcctctctaacaaggcagcttacttcatcaaagtacataagccaagaaggcaccagaaagttgactagcaaaacagaagtcacaatcttatgtcacttaatcacagaagacattgcattacctttgccatagtctgtgggttacaggcaagtcataggtttcatccaaagtcaaaagacaagatttcataagggcataaatattagttggtgggaaccatcttacagattaactgccacacatggtttcatctgtcatgggattactgtgactattaagtcactcagttcagagtaagcattttgtaaatattagttcttgtccattgtgaaggcaccttcttttccttaattgttgctgtatccaattacttttgttggagttctgcacatacattttctcaaccacataggcttccatgaattatgctttagagattgttccaggcaattactgagattcctttcctagacagaccattttcctagatgctttcctagtgaactaattgaaacaggaactccttaatggactgtagaagagacaatggacagagcaggaacagaaacagaaagaaaagaatgcatacagttttagggagagcaacagtcatgcactggaagagaagattcctagaaggtttgtaagtaaggcatgatacaaacaaaataaaagaataaactttagaatcatatctggatttgtatataaatctaccactgaataactgtgtattcttggacaaattgttatataacttctctgagcctcagtttcctcatctgtaaagtagatcaataaaagtttcctgattcagagatgtgatgtggagctaagatgagataatcctggtgaagagcttcacaaaatgcttgaaatatggaaaatacgcagtaaattttgttatcatcatcatcattgtcatcattattagtgtacaaaaacaatttggaatctgattatagggaacctaaaattgctgtaatgagagaaaatgtttgttattattcagaagataataaagagccattttagatttttcagagttcctatagtcagtgtccctcaaaaatcactgtctaaaaggaggtgtaataatagttttaaatatagagagcaaaacttaaattaattttgttagaaggcaaggactaggggtatgagtggggagagctgagttataatatattaatgaataaataattgcccactggcatggattatttaatttaattattttatttttttaattttgccttgcttgtacttctttgtggaaactgcaagatctgaaacatgtcattcatgaagtggatcatggataggttcagtcttgtagaagaaccaataagtgaacaaagtcaaactcactttattaaatctccatctaaaaaaggtcatttgaacaaaaacaaaaacaaaacaaaaggctgtgctcaggtgtctgcaggtttgtgaatgtagtagatgtgaaaatgatagaaaccagataaagtgataaccctgagcagcttgttttgaacagctgctgtagaaaacagctgttccaggcagacaggggtgctcagaggtttcctagcttctctctagtgctttgtcattgtgtttctcccttaatatcttctaacatgtgccagaaaatattaagaaagccatctattcatgcacaaaaatgaggagtaattctataccctttagctttaaatctgcatggtctaagccagtaagagatcacaaaggctgcctctcccctgtgagggataacaaaggtgagaataacttaaaggtgtagggcactggaggagtgacatcagcacacactcaaaatcagtaagtctttgaagagctcttgaggtaagattctaccgttttcctgaattcccgttacataatcaccaagtagaaagccggttcccactcaaacacatctagaggtaagaaattcatttttttcctgggcagccaagttcattttcaggcagttaaggtgtttaacaggattgcctggcactgagctgaacttggcctacctacaacttactggtgctagttatgtccttcggaatcaaacaaagttgggctatctgtgtcacaatgcagcttctgtattcatttttcaatggcatcttttctggtatatcgtgtgtattagtccagttgtgttactattgaggaatacctgaagctgggaaatgcataaagaaaagaaatttaattggctcacagttctacagctctaccggaagcatgccaatgtcatctgatcggtttctggtgagggcctcaagaagcttgcaatcatggtataaggtgaaaggggagccggcatctcacatggcagaagaagaagcaagagtgagaaggaagaggtcccagactcttctaaacaaccagatatcccatgaactaaccgagcaagcactccctcatcaccaatgagatgctgctaaaccattcacaagggatccacccccatgatccaatcaccagaccccacctccaacactgggaatctcatttcaacatgaaatttggagatgacaaagatctaaaccatatcaatcatccatatttcttttaactattttttagatatcatgcttgatagactgtttacctctgagaacaacaaagaaagtagaaaacccactctgaatctggctcctaagacctaggttgtagtatcccttaatgaacaagaacaattcaaacaataacagacaatgtcactaggtgaagacaaaaacaaggccactccatattcaactctgaacaaggaacaggctaggatgctgtaccaccaggaagtaaccaaacacccctttctcctgcggacacgagagactattgcttctttaccaatttcaactctagctccacttcatttgtcctggctcctaaatggaaattgttcagatagcagcattagccatatagcccaaaggtggaaacaactcaaatgtttattaaaagatgaatggataaacaaaatgtggtatactcacaaaatgaaatattgcccagccataaaaaatatgtgaactgacatatgctactgcattgatgaaccttgaaaacattatgctgagtgaaagaagccagacacaaaaggccacatacggtatgagtccactcacattaccgaagaaccaataagtgaacaaagtcaaactcactgtattaaatctccatctaaaaaggacatttgaacaaaaccaaaaacaaaacaaaaggctgtgctcaggcatctgcaggtttgtgaattgtagtagaggtggaaatgaatctggaaagtccagaataggaaaagctagagacagaaagtagattagtggttgcttagaacttggagagagatgagggtgtgaaagtaataactacagggtacagagtttcttttggaggcgatgaaaatgttctaaaattggttgtggtgatggatgcacatgtctgttgtggaaataaatgaaaaccaactggctgtttatccagagcttgctacagcaagggagtcggccaccagcacctgtgtttggcagactctcaaaaggcaaagcagcagccgcgccctgattggaggctgctggcctggagagccactggcaggctaacacagaaaggcctcctatatgattgtttaggggtacatatttggcttcctctgactgatcctgaattgaaagtgagggcaaaaattagggaagctggaagttattaatcaaatcctggccatttggggctgatctttattggggttaggaattggtttcccggattatttaccagaggaagtgaccttacttcctacagatttgacagagagtagattggcttcctgggcaggttattgtagataatgggttggtatcctgtactggctgctacagactgtgggtcacagtttatttttacatatagtctggcccttgttcatatgtatattcagtctctcacttgagtatactaaaaaccattgaattgtgcacttttaatgggtgaattttatgttatgtagataatatttgtataaaactgtaacaaattcaaaagagggacatatacttcaattatcaaattgcatctgctccctgcaacatccaacccagagccaatcctcgcttctttaagcttttcccaaaatctcccagcataagctcaatccctgcaataagcccatccttccttctttttgctaagatatccatagtttgtatgctgatatcttgctgtaacgagttagtaaactgggctttctccctactgcagtttatctcctctaacaacagtaagtctgtacatatccttcttgcatcatgttattggcagatctttcacacatgtcatcagatcagcacagaaacaagcaacattgccaccttactcattcttgacactgaacttcattgtgagactgtcatctgctttttttctgaaacatctatcctcttaaaaaacaagagcctcaaagcaggaaaaggtatattatttttccccataatcaggtccttttttgaggaaccattaaaagactaatctaaaaatattaatagtcatagaccataaaatgatgttttgcttaacaatggactgcatgaacatgaacatgcatgaacaatgcatgaagatggtcccaaaagttataatactgtatttttacttcaccttttctgtgttgagataggtttagatacacaaatacttactattatgttacagttgcctacaatatttagtacagtaacaacctgtacaggtttctagcctgggaacaataggctataccatatagcctagctgtgtcataggctacaacatctaggtttgtgtaagttcactctaatgtttgcgcaatgaagaaatcagctacagctaatgatgcgtttttcagaacatattcctatccttaagtgacacatgactctgtgtgtgtgggtgtgtgtgtgtgactgtgtgtgggcatgtgtaaaactatacttctgaattggctgtaagcccatattagcttccttgaagcaaccattcatatggaaatggtcaaacacaaggaaattgagaatcaatactgaataatttaagttacttattaactttattacattagcagtagtacattcatttcaattattgatctagcttactaatgagacttggcaaagcttcttgtattgtctataacctaaatgtgagaggagaaaaggcagggaaaggaaaatattcttttgatctgcctggccttcttcaggcttaggaattaagaatttcatttcttggagccatcaggagctccaccaggttttcagattcaagctatcagcactgcttctcttatttggagagtagcccacggtcactgtgcttcctacattcanattgttcataagcagaatagtaagagacccaggctataaaatgctgacgctgactaaacaaggggcatcttatagaaannnnnnnnnnnnnnnnnnnnnnnnnnnnnnnnnnnnnnnnnnnnnnnnnnnnnnnnnnnnnnnnnnnnnnnnnnnnnnnnnnnnnnnnnnnnnnnnnnnntcatatttgttatccacgaaaaatgaaattataaagtggcaacacttcaatcaaagatttcaaagtgtgccgcacacatagaccctgctgagagaggatggagtaccttgtcagaacgtctaatgtggggattaacatggggcctgtgtgatgagcccaagtctggaaaaagggtttttgatttttgttttttgtttttgaaggggcaggaatggaataatgaatttattatattttctcccttcataataattttaaattatatttcccacaatgaaaactactgtagctgaacctgattgtaagtctttgagaaaattttatcattctgactaaatatgcagagcctgccatacttagtaagaggtaaatatttttaaatctctaaatggatttgctggcaataggtgctcttttatcttagtgtatacattggtttaattaaggtaaatttaatacaaaagtattctgttctcagacttggaccaagggctctgggggaaattacagaaggaaggcaaggacagaaaaattggtggaacttccagaccagccagtaacatttccagaatggctaagagcattcagtaacagcatcacccaatatccctttatgccaagaggaactgatcctattcaggtctgcggaaacgaaatctaccaggcactgagcattttctagttcttcatctgcttgtgctcagtcaagaacagtcaaaaacaatagttccctggttatggcctgccctattcatcagagatttagaaaactaccatcaaatttgtgggtgatggcaaactcttggctttctctaatacacattaaataaccaggtcactgcctggataacagaatcattttcataacctgcattttaatttatttcaactcttattgtaagactacaccaaaaataaaagtcatacgtaattcactattacatttgctataaaaatgctactgtagacttccacatgagaatatcattttagaattttgcttaaggaatttgtgtttcccactttccattaagaagaaactcattactgcttctgtttgggctcagtgtaacagcaagcactgcaacaaagttaaaagttgttaacttacttaaattattttctttgactttctagagctttttatattttaatatacttttatataatatttcactgtgaatatttttggcaaacagactatataatttctgatagcttcatctttggctacactgtatctatatgaatatgtttttttttgtaaattacctctgaaatttttgaacataggtgagatacaaatataaatatacaaaataaaacaaaatatagtgtcagaaatgactaggcaggcccaacccttttgcagggcaggagtacaagtggagatccgtgtaccatatatttgaacagttaaaataaagcaaactaataaacatatttatgtgtgtgtatatatttataatgcatatatagacacccatatataatctacgtttacgaatatgctttcataacaacaaaatgtgtatataactgaaagtcagcaaaacataaaaaagaaatgaacttaattattgtttaccatataatagtcaatagtcatctctggggaggttcctggaatatgggagaggacaatgaaggaaaattttcattttaactctgttatttgaatgtgttctttaactatttgtgtagtttaaattatatgaaacaaaacaaatacaagcctcccaaagtggaatctgagacagcagactcaagagaggcttctctcggcttctctcctttatctatgtgtctcggaggcatggcttttctgtgcctgagtagctgatctctcctggtcttcaggaaaactatctctgtaggatcctccctttgtctgtgttacttagagggtcagacatgttggggccttttcttcccggctataaggtcagctaatcccagctcctctgtttggttttacaactttgtatctagggaaaggtagtcttttgacttataaggttgcaaattaatgaattagtaccttttcattttgtcttctgtcacaagttgctcctaaaactcagagtggcggataaggttgttctcattatttaacagaactaaacttaatacattctgtatagcctttacaaagctaaaaccctctcaaagcatttgataacccataatccaggtatgctctgggtaagtggaaaataaaactcagtatctgtacaacctacacagcatctaaggaatatggcttttgaattgatataatttgattcctttgtttcagtgtgaaccaccaaagcagatgtatgaaatgagaggtggaagagattttcttgtggataaagctcagtatttccagacaaagctcatgaaataaaactcctttgattcattcttttaaaaacacaaaattcaaataattcttgattaatgtaggtagtgtctttatggttaaggcataacaaaatctccttccatcaaacaaatattgtctggagcaagctgggtaccagacccatcattcatactcagggtaaatggctatttcctataaaactgtcctttcagaatgaattctgcactcagtacaccatgcaagcacccaggagctgctgcccaatacagttgtttcctggcatcctaggctagaggaggccaaattccacatgttctaattactctggtcatactaattagtatttcattcattaaagatatatttgcaaagtagaaactgtaacaactctggtgccatgagactaaaatgccttccttgttagaacaagcctgtactccaaaatactctgcacacaggagcctgagatgcataatttggatccatttccattaaagaaatggtcctcctccacccggtcccataatgtaattaacattgcaggtctcatggctctctttaagagaattagaagccatgagtcatttgggcatcatcagaacaagctctcctaatgtaaaatgactcaatagcagagattgctatctggcagcattccgagatatcaagacctgaaagccagcacttaatctgatttagggcctcttaaaatattcttcaaacttgactagacattgttctggtaaaaaagatagaaacttattttaggaaccacccagggtctgagctgtcttagctgtgttattgattccttttaagtaattgcatttaatttggaaacctatggacaatgacgctgatgaagaaatgtgactattccaagtaaagtcacagcaagtgtatggaacaaagataatataaaattagaaatctttgtatagatatgctgttgctctacttcagagttcttaatgtcaggatttagtctattaatgtacataaggacattttcatcatgaattaagtaacagtgaaaataaaattttaacaggcatcttagtaggattctaacggtttataaaagttaacccatcaacatggtaattgttcaaggtagaaatgtggagtagatgtaaggtactattttaacatttaaaatgtttccattttgggtctgtatcttgatgtttttggtcatattactcccttttacttattcacaaattggataaacacaatgtagcaacacgatggctcacagttaattttggtagaactgaatgcggggtaaaacacttatacaccactcaaacaaggatggaaatggacagaatggtcaaatcttcaagtttcattaggaaatggtgtaggcacccaggattttcccaccagcattaacagttccttttattgctcatcaagattctcagtagaatttgcaaacttatttatttgcatatcaaattatattttcaggttgggtagcattttgtaattccacagaacttgtcgaggccctactctgtgtaggttcagacactctttaccccatgcggactcatcctctgaattccatagagtcagttttgaaactcccatccctgactatgaaagacctttgtcagctggatgtaggagctgcagaaagaactggtttgcaaagcaacctatgacacagcaaactcttttactaggcattcataaggaagaggtggcataacatctatccccacatgtcttatcagttgctatatttgatatccatttgagaaaacaagagcagagttaaaatgccaagccaatcacctctttccccctggctttaggcaatagcctcaaagaccttaatggatcccgatggagagatatttggaggaaaatgaatacctttgtaaaaacataattgatatttttatcttggcagattatctaactaattgtatctggtctgtcaaatatttttggcaggttttatttttttaatttaaaaatattctttagcttttagagtagttttagattcacagcaaaatagagcagagagtacagagatatttcaatgcccctttccctgacacacccatgcatcccccactatcagtatctctgcaccaaagtagtacacttgttccagttgctgaatctgtattgacacattatcactcaaagtccatagtttagcttaagatatgcttccagttttgcacattctttggcttgtgacaaaagtagaatgagatatattcacctgcctagtatcatacagggtagttccactaccctaaaaatcctctgtgctctgcctattctttcctctccttccctaacctctggcaaccactggtctttttaccgtctgcgtaatttccccttttccacaatgtgatatgcttggagtcattctccatctctttacatttaatatatatgtgtctttatatttcaagtaaatttcttatagacaattgataattaagtcttatttttaaatccactttgacaatctctgccttttaattactgtatttacatggttgaattttaaagtgattattgatataattggattaatatctacaatatttgttactgttttctattcattgttcttgtcttctgctctttttctgtcatatgtgattttaattgaacatttaattcattttatatgatttcattttatctcctttcttagaacaccaattatgcttctctttttatttttttgagtggttgctatagagtttgtaatatacaacatctaatccaggtccactttgaaataacagtatactgcttcacggataatttaagtaacatatgataacaagctattcttaattttttcctcccatgtcttgtgtcattgctgtcattcatttcacttatacataagctataactcaaatacgttgttgctactatcttttggtcataatgttttatgttatatcaattaagaataagaaaaaatgactttgtattttaccttcacttattctttctagaatgttcctcctttatctatatcagaatttctgacctatttcacatttcttctctttaaagaatgtcttttaacattatttgcaaggcaggtctactgacaataaattccctcaatttttgtttgtcaagacagattctatttttccttcactttggagaataatttcacagcatacagaattttcttttatatgcttgttggctgcatgtatgtcttctttggaaagtgtctcttcatgccctttgcccactttttaatggttttttttttttcttgtaaacttgtctaagttctttacggatgctgggtattaggcctttgtcagatgcatggtttgcaaaaaaaaaaaaaaaaaaaaaaattccccactactcagtaggttgtctgttcactctgttgatagtttattttgctatgcagaagcactgtagtgtaattagatcctatttgtcaatttttgcttttgttgcaattgcttttcatgtcttcatcacgaaatctttgccagttcctgtgtccagaatggtattgcttaggttgtcttccagagttttttttttaactttggttttacattttaagtgtttaattcaccttgagttaatttttgtatatggtgaaaggaaagggtatagtttcaatcttctgcatgtggctaaccagttaccctagcaccatttattgaatagagagtcctttccccattgcttgtatgtgtcaggtttgtagaagatcaaatagttgtagatatcagtcttatttatgagttctctattctgttccattggtctatgtgtctgtttttgtaccagtaccatgctgtttttgttactgtagccctgcagtacagtttgaagtctggtagcatgatgcctccagctttttttttttttttttttttggcggagtctcactccattgcccagactggagcgcagtggcatcatctttgctcactgcaagctccacctcccgggttcacgccattctcctgcctcaacctcccgagcagctgggactacaggcgcccaccactgcgcctggctaagttttttgaatttttagtagagacagcgtttcaccatgttagccaggatggtctcaatctcctgacctcaagatccgcccatctaggcctcccaaagtgctgggattacaggcgtgagccaccacaccaggcctgatgcctctagttttgttatttttgcttaggattgtcctggctatttgggctttttttttttttttggttgcatatgaattttaaaatagttttttctagttctgtaaagaatgctgttgatagtttaagaagaatagcattcaatctataaattgtttggtcagtatggccatttaacaatattgattcttactattcctgggcatggaatgtttttccatttgtttctgtcatctcttatttctttggatagtgttttgtagttctccttgtagagatatttcacctgcctggttagatatattccaaggtattttattattctgtggcaattttgaatgtgattgcattcctgattttgctcttgacttgactttcattgttgtttaagtgtgctagtaatgtttgcacattgattttgtatcctgggactttgttaaagttgtttctcagcttaaggagcttttgtggtgagactatgtagaattatgttgtttgcaaacagagacagtttgactgcctctcttcctatttggtttcccttctttctcttgcttaattgctttggccaggacttccaacactatgttgaatgggagtggtgagagaggggatccctgtcttgtgtttcaaggggaattcttccagcttttgcccattcagtatgatgttgactgtgggttatcatagatggatcttattattttgaagtatgttccttcaatgtctaatttattaagaatttttaacatgaagtgatattgagttttatcaaaaggcttttctgcatgttgagataatcatgtggtttttttctttagttctgtttatgtgatgaatcacatttatcgatttgtgtatgttgaaccaaccttgcatccgggcgataaaccctactttatcatggtggattagctttttgatgtgctgctggatttggtttgccagtattttgtggaggatttttgcatctatgtacgtcaaggatattggcttgacattttctttttgttgttgtttttgtgtttctgccaggttttggtatcagggtgatgctaggagtatgccagttgtctcagtccctcagtggcagctcttccatctggctatatctagttggccatcttgctctccccatagcttttattattaagtataacacaaaacaattctttctttcctttctgtttatagaagttattaactgggtttaaggttttcattatatgtaatagaactatctgaattgaaaattgtcatgatgataattgacattaaaccttaaacattaaactagctacagaaaactgaaatgctgctgaattccagttgatggtagaatggtttaaaatcatgaatgtgattaattttaggttattaatttggctactaaaaatatacacaaatatacctattttcagctggaatggaatgtagaaatttaaagcactctatttcaagagatggaggtccaaagagttaaatgacttgccaagatcaccttgctagttaatatcatttctgaggttaaaaccaaagactttttttccttgtttcattgttctatgtttaacatctcttttcttttagctcagcatataacaacatgtaactaatagccatgacaagagttaaaatcaactagaaactagaacaaataattggggagactggtgatttaaagaagctcctttgcttcttctaaatgcatggttggcccaggagtcagtttcaaaattatggtccaggttggtccagggtgatactctagaacctctagtttttaacatataaacctattgatacatattattttatatatttattgggtacatgagagtaattgttacatacatagaatatgtaatgatcaagccagggtatttgaagtatccatcaccttgagtacgtatcatctctatgttttgggaacatttcaaatcctgtctcctagctgttttgaaatacacaatgtattgttgctatctatgtcaccctactctgctgttgaacattataatttaaactgttaatgcgagtcagtgggccagagcatgcaaagttcctgatgtttccttagtgttacactaattataaaaatggagtagatgtatatggagtagatgtaaacatttatttatataaagcaagttatattactaatgaggtcatagatacaattaaattttattgaaaagaaataatgctgcactcgaaaaatttctattaaagaagctaacatcatttgctaaattggccctaaagtttctcacattactgatataattttgactaccaaagggatctatataaaaattagagtagtaaagatcaaaatgatttttaaggataactttaaaggaattgataggtgatattttttgcaaatgtgtttctcacaggtactggacaactagtctaaggacaactgtccatggtgctgaaaagagttctgcataggtatattgtcttctatcatgccccgtcccttcttttgccttcccttcaaagcaaaatcccagcatgtagcaggaggagcagacatgacttaatgtctaattgaatcttgaataaataataaaattgagtccgggccccaaattatcagtatttaatttttatctggtaataatagtgttggtgctacataaggaagggagacagggtgtgtaaatttgtcttcatgtggtgttttttttccatttctattgtgcaagtccttgagataaccaaggggttcgagagaagagttccggctttcttgagaaacagccaaaatgtgaccaggagctgtgtatttcttcacggaatctttgaagaatccttggggttttatgatgggagcactgacattactaagaagctcacagttagaaaactggagcaatggactcaagacatagggccttttctttctcctcactgctttattctccctattctctctcattttcccaccccttctatccagacctctctgcataagtatgatttaaatagctccccatggtatttcctctcttccctttggtggtcacactttcctcaaaattatgtgcatttcaaatcagggccagtgcatggcattgtgggccctcctctatttcagagccagacagaggtggaagccagactgtgaaatgtcactttgatgtgagcatggtgggaccacatcatcaggaaagcataacatgaccgtaggcatgagcccagctcaggtctagtgagggcatattctccttctgggaatcattacaacagctcaaatctcaaaaaaatcaaataaaatatgatttcccacatggtggataataataaacagtgattgcccacctgttgctcatgggctctgcaactattaggtgtctgcctcacgtcctggtaccagatggttttccaacaatttgaaacttcctctgcattttcctatgcaaaataatgtcactaaggtttcaggataagcaaaggtataagtttgtaaccaaaggaaagattatgactccagacaggcatgaaatagcaattgtgatagtgatgtcttgaggagatgtatatttatttaccagtagatgtccttaatccagatttgagataagaaacagaaagtctagttactggcaactgatacttgtttgtaataatgatttcccaagtgttatttggcaattagttaatttttaacatatcattgcttctaacagaagtcattcatttctggaggcaaagaaactgatgaaaattatgaagtcaggaaccattttataggaatatttgaatgaagtaggtcaaagtctgaaagttgagaccaactgtgcctgtctgtcctacacagagggcaaggaaggataatgactaggcctgcgggcacgtgcatatggacaaggccacattctgatttagaaaacagtggtgatcgagcaatatgttaactctctctgcttcatgtcaagtctgccttgctgcgtattcattccagcatgctgatagattccagtgatggggactggcttgtttccagcaaagatctaggcatcttcagtggcaaaagaagaagtggacttttttatctttcctttggagatagaagaactttatagagtaaccaacacaaactgagtagagagtaatcctgaaccaccaaaaaggcaaatccaaaagagttaatgggtagaatgtgatctacaaatcaaacttaaagtcagatattggtaattgtggggtatagttaggcaggaaaggctgcctggaaaaatgatgacactcacttttaatatattaaatatttaatatattggtaatatcaaagaaattgggatttagtcaaaatggtataaatataaatttataatgatcagagctcattgtgggataagctggtggtatgacaattaatgattcagacatcttctatttcaccttttggtataggcgttgactcttaccttttagactgacctcctccgttatgtctttcctcttcttcgtcctcctaattctctcctcctactccttctcctcctccccttctctcttccttctcttcttcctgtttagctttcgataaatacttattgggctgaagtaagctaaatgaaaatgtggaatatcttctatttaaaggatgaatcaaaatcactgtaggtgagaaagctttattcttttctctaaaactcattattggaagccaagctaatgttgctttaggatttcttctgtttattttggaattgtccatctggccaagaagcagtaattattcattttcagtgaaacctagtggtgtgctcaaggatggcagtggcacagtggcacataaatttcagtttgcccaaatatgccagaacaagcgagtaaaacattgaacatacataaattttttctgactcattaacaaaagtaaaatgagccgcaatattttacttataacccactatgatgttctaaaattataccaacttttagttattggcatattcaccatatgccagtcattttattattcactaatattaaactatattgagaattgtcagagccacagttaaagtttaagaactagggcatctttaaaaaaattgcagtaaagtgacaaccattttctgtagcacaggcttctgtgactgaagctatgttgacaccaccgacatgtatttaaaaatgcaaaaaaaaattgtgagcagtctttagtcacccttgtaaaacaagctctgttaccagcctcttgctcatttcactttactcataatatgaattattttaatatatttttgtttattcatttatatgtatttctccctattggattgcaggctccatgaaggaagtgatcttgtgtatctttcacactataatctctttggtatatcatgtagttattgcaaccattgccaataatgctgtccatacttatgaacctgtggatcagcagagatgtctcttctgaggctgtggtggttgggatcatctttttcacagtgcaattcagcaggctggatcttgctccacacttctctcatccttcttctgggacttgttttccatatggcaatgacaagatgtaaaaaggacaagcagggaagtttatagctattaagtacctacatcaaaaaacatgaaaaacttcaaataaacaacttaacaatgcatcttaaagaatggaagaagcaagagaaaaccaaacctaaaattaataggagaaaataaagatcataccataaataaataaatttgaaatgaagaaaacaatataaaatatccgtgaaataaaataagttttttaagaaagataaacaaaattggcacacctttagccacacttgagaaaaaatgagagaagactcaaataatatctgagatgaaaaaggagacattacatctaatacagcagaaatttaaaagataaatagtgtctactatgagcaactatatgtcaataaattggaaaatatagcagaaattgataaattccttgacttccacctgcatgtcttagccaaatcaaggtacatggccaacagtaaagccagagtgtggaattacaatgtgtccatgatgagacgnnnnnnnnnnnnnnnnnnnnnnnnnnnnnnnnnnnnnnnnnnnnnnnnnnnnnnnnnnnnnnnnnnnnnnnnnnnnnnnnnnnnnnnnnnnnnnnnnnnntatatctgtcaatctatctatgtatctatctgcctacctatctatcatctatctatctctgactgtctatctacacacacacacacacacatacataaatagatacgtagctattgagatatatatccccttgtgtgtgggtggggggaggaggggagggatgtggattgtttttgttttcctcttctgttaaatgttggataacacaaacttgagttctaataaagaattgtatttctcagctgcttgggaggctgaggcaggagaattgcttgaaccttggaggcagaggttgcagtgagccgagactggacattgcataccaacctgggcaacagagcaagactccatctcaaaaaaaaaaaaaaaaaaaaagaattgtattaaaaaataaataaataaatggtgccgagcactgtggctcaggcctgtaatcccaggactttgggaggcctaactgggtggattgcttgtgctcgggagttctagaccagactgggcaacttggtgaaaccccatctctaccaaaaatacaaaaatcagccagatgtggtggtgcacacccgtagtcccagctactcaggaggctgaggtgggaggattgcttaaacctgagaggcagaggcagcagtaagtggtaattgagccactgcactccagcctggctgacagagccagatcctgtcgcaaaagaaaaagaaactgccaggcacagtggctcatgcctataatcctagcactttgggtagccactgttagaggattgcttgagtccaggagttcaatatcagcctgggaaatacagtgagacctggtctctacaaataataataataaacaaaataaaataaaaattttttaaaaattatatttgaaatatatatccatataaaagtgtgtgtaggcacacacacttttatgttttctgtgaattagggaaagatatccattccttaagggaaagatatccattcattaaagtaataagaaaatatgtgattgagaaatacatgggtgacatataagccttcaaagatgggcccaatactaacaggtagaagaataaagaattgaaggaagagatgtttagatggagcaagtcaaagaggagaagaataaatggggtgtgtgtgtgtgcgtgtacactcgcacccacatctgttggtgacaggctttgctggcaagggagtagcttggggaaatgggagagataaagatggatgtgtggagaaaactcaaattgcaagctaaaggatttgtattttgtttttgcaggcaactggaagctagaaaaaattcttttaagtcttaaaaagttttcagtggaatttattctgaaatttaataacatagacatgaatggtgagtttagtgaaaaggaagagtcagggaaagtggtaggtgatttcaattccacctagatgaaggctgaagtaaagcagtgacactgggaatgaaaaaatatcggtactaaaaaggattatgaagagtgagccaacaacccttacaagaaggagagagaggtcagagagagggaaaatgaaaagaaaaacctcaagtttacagttttggagctccaggggtgatgataaaatcaatgacattagagaatttgagaaaagaaggtggtctaaggggtaagttgattaattatgtatgctcacacagcaattaaagtttggaaaacaacattatttagtcttttattcaaccaattcaatagggccttctctagtaaccaacagaactccattccttatcaatttggctacattttgtggcaggaaaaatattctaacatatttgcactgtcatctttacacttgcatacttgatttatgcacccgtgggttttaagttctagtctcatacaaagcaatgagaaatcacatatatcatcaataacaggttcattccctggggttgtgtttcttggaatacctagtgcatcagttatgagagctgtcattgccaaaccaacctggctcctgacattctgaagagggatttatttctatgttccctattttatttctggaagtttatgttgatgctaaggaaaaatcagaatttcagcacggtccacttaattttggtaatttaaatacaaaatagtgggagtccttgagcaaattaaatattctcatattcagttacaatatgaatggacgaaattccatgaaatgcaaataaaatgtctaaggagaaaagagaaaatactataatctttgctagcgtatgtaaatttatagttaaactgcacatctaattgtagtctgttttttacaatttttcctctaggatattattagagatgatggaaagtttataaaaaggagagaagggcatgagattacttcttcatttttaatttctaagtgtctagtgtcaaaagtaaaatataatgaaatgctttaaattgtaagataaataaataaagatgaggagaatcaagagtacttaaccatccttgggaaaatgaatcatgatctctagtgttaggttgctcagtctgtggcctttgcaggagggcattgcccctaaagaatctacaactgggataatatatgtgtatggtgagataatgtacatgaacctatgatgaccctagcccagcatggacacaccagtttttattcttcttttgatacatcttaggtattgaatattatatgcataactgtactcttcacatttcttcaacattgactaaaatatgttcagacacacaaaagtgcttttaatatagtgctaataatactaataatactcatgtctcataattataataaaaacaatagataataaatctttctggtgccttatataattaagaattttctttgtttttagaccacaaatagtgatgattaatatttgaaatccacagttttccaatgggatcatttctatgtcttatgagcattcttaggattcaccaactaacgtaaagggagacttgtacaagttaccactaaggtttgaattttgttatctctgccgagggaaatggattgccttaaatactaaaaggagatcatgcataagtttccatcaaatctaggcattaaggaaagcaagacctagacctttctaacagtccaatggagagcacacttttctgtcaaattttatcaaaatgacgagtttttcatctaattaatttatggagaaatttgaaatttcatgtatgtgacttagtatgtattactcatgagggaaaataatatttctactcatttttaatgagttagtataaaatacattaccttttacagaaaaaaaggaggagaatcttgggtgctcccacttaccagccctacaaaaatgcaaaagagctgaacgacatcagtgtaggccacagaatagagccctcccaccagtgtgtacagagtggcaatgagtgcagagatgatgacagaaatgtgcatatccacatcgatgatcacgctgatggtggctcctgaaacaaacaagagagttctgtggtcaaggtgcccagacagattctgctctttgtataaggacataatgaaagttcagtgataaacaacatttttctctctgtcatatgaaatgcagtggatgaaaacacctaaagttaatttttatattgaaatttgtatatcttaataaattcagtgagatacatactttttctttctgaaattactggtttgctaacttatttatttggaggacacacagatccatggtatggttatagaagaccctgaattactgagaaatttaattacattacaagaactcaaaataatttcactatctggaactctgactcaatcaaatacagccatgtgttgcttaccaatagggatgtgctctgagaaatgtgttgttaggtgatttcactgttgtgcaacttcacagtatgtactcactcacaaatcttgatggtgtaacctactacacacctaggctacatggtatggcctattgctcctgggctacaaattcgtgcagattgttaccgtactaaacactgtaggcaagtgtaacatgatggtaactatttgaatatctacacatcatatctaaacagagaaagtaacagtaaaaatatgctattataatcttatgggaccactgtcatatatgcagtccatcattgaccaaaacgtcattacattaccaaacgtcattagtcacatctatgaaaaacacaaggctttctgagaaacatgatcacccatttccacattttacaattgacattcatttgccattttgcatttactctgccccctactaggctttgatagctaacaaatggttaaggcagcaaagaattgagaaaaatttgtaggaacaaattatcaaattggtaaatgttattaatcaatttctccctctttaatttgcgacagatcactcttcttttatttaattggtagaacataccagtcctgctcctaggataccagtatactgaagagcctaagatttgaatatcatatttttaagtaattttcatcatcaacattttaaacttctcttagaaatcaaatttatgtttctctttataacattgtttattgtgtttgttggtccctatatttccactgaacatattgaggtatgaccagtttgggccgctgtggttcttggactgacagttcataattcacttgttgctttagtagccttttccctattgttctcaaaactatacagtttacatgtcacattattaaatgcatacatgtaatggatctgtgattttatgtatcatcagttgcagccagctgagttgtcttacaccctacccccattcctcaattggcatgctagtagtatatgcaacccactggagatgaaactacattatctcaatataagatgtgttgatccaaaatatcagtaagaaatatttttcagtgttttgctatggtgataaaatagaattattttccagagtaaagatcccttgaaaagaaaaatctagtaagaagttggagaatgaagacaaggatgagagataattatagatgagtgacttcagataactgactgagttattgttttatagatatttgaaaagttattttttcctgagatcatttacttcgaatcgaaactttacttccaacactttgtcgttctttttttttgtgtgtagttctccactttaataacgcttctaagctatataccatgaattatgaaaagttcaattataaaataaagattagctgactaaaatctcaaagatttggggtcctagtagatgctgtcacttaactgtaactcagagatattagagacgtcaatcacttctccattatcactattaaaattgagataaaattttctctaaaatattttctgaaaaattaaatcaattgtaagtaaaacaaagtgatactttgaggtataccaggaaatattagtctactcatgaagctataaaataagtatcctgcaaagttatgaaaatccactgaacttgagctgttagaagtgtaaatacacatttcttcaaaatgttgtaggatgtcaatttctaccaagaagatagtttaagattctcctatgtttcaatggcgaactatacacattcacagaaaggtggtaatagatcttatatattcttgaatatatcaaattatttgtaataaacactaaattttaattaaatccaactattactttttatttgtgtaaatttaaagattacaggtgcaatgatgttacctgggtatactgcatagtggtgaagtttagactttcagtgctttcattacccaaataatgtacatagtacccagtaagtaacttcacacacacacacacacacacacacacacacacactctctctctctctctctctctcccaaagagttcaagcaatagcagcaatgtttttatatatgttgtttgatatatgtgagtgtttagaaagatacagacaataacatattttacatatgtagtcatggattaggtaataatgttaccatcaatgatgaaccacaaatacataaattctcataaaatcataatgaagctgaaaaagtcctattgcttagtgacattatagctattgtattacaattgcctatagtattcagtgcagtaacatgttgcacaggtttgtagcctaagagcaatagactatactgtatagcctgtgtgtgtagtaggcgctaccaactcggtttgtgtaagtacactctatgttcacacaacatcaaaattgcctgctgatgcatctctcagaatgcatctacatccttaagctgactgtatattgtaatacaggcacaaacacagacacacatatatacaaaactaattataacacagttcacagtttcgttactatattttatatttccaaaatactttagaagcatttgcttattaattctattctttcttcagggctctgttatataagttgatctttactcaatgagtgaacattttgtattttgttatatactcagcccactccttttttgatacctcagcaggtaatttgttcttaaaattaacattttttggtgttcaaagcaatggcaaacaagcgcccaatgcaactcagctaatgagagtcaggtggaaagggaggtgtagttttacacataatatcattagaacataagagcagcagtggatgtggagtattattatccagcaccagagaagtgcagcattttccacctagttgtttctttttttttctttttgagacagagtctcactctgtcgcccaggctggagtgcagtggcgtgatctcagctcactgtaagctctgcctcccgggttcacgccattctcctgcctcagcttcctgagtagctgctgggactacaggcgcccgccaccacgcctggctaattttttgtatttttagtagagatggggtttcactatgttggccaggatggtctcgatctcatgacctcatgatccgccctccttggcctcccaaagtgctgggattacaggcgtgagccaccgcgcccggccccccacctagttcttgctgtattttataacgatcaaatactcttgtttcggcaacagtcactcttttttatagttggcaatcaaaaaaatcctgactaacctgcgggatgaaattggatgtgctgaaggcggggcagtgcacacctttatggggagcttccatctcccagctgcctcaacagcctcagtcaggtccaacagtttcaactggtcccatgtggtacacatctaagcctgtgtctctaagggtagattggagtcgaggagacgctaaggcatgggcaagctttctcatgtaagttattgagaagacatttaaactgaaggggaaattcttgttatattctaccatacttaaatttttccactactaaaccgtaacattgaactttataatatcaatttatggaaatatttcaagtttgtagttttgctgtgtgacttacattacttacctattctgtcagcagagggttggtgatatctcacttctctaggaatgttatttactgctggaactgactctgttttatatatgtttttaattaaacattttatttaaaaagtcaacatctctgaaaatatcagtgcttttagaataacatgcaacactgttgtctcaggagtttaggtagttttatatctgtgtttatgccaattaacatggcagttattagagggaaaacaatgggaggtaaaaagttctcagtttgcaggaagaacacttattggaagaaattaagatataaatcatttatttaaatttattcaacaccaaaaatatgtattagtattctcactaacccctggttcatgaatccttgttttaaacatttatgttaagtaaactgcactttttagctatgcttaattcattattctttgttcaaaatcatatatgactcataaaagcaaattgatcattataattcatagttattggtctaatgaggcaattcaagtatggaaagtgtagctgaggttttatttaacctctgccaccatattgcaagtaaacgtagaatttccattaagcttttatgcatataaatatggttcagcatacggttttaataaaaatgtcctcagaagccaaggctgaggaaagtaaggttgtgtatctgatgtttagttaactacaaagatgcagctagacaacttagctggtccttacccaaagcagagaaaattgctgcagcccagaacatttctcccatcagtgcaggaataaacaggagtccgcccatgcgttttccatagatttgctgaaacgggtctaacatggtcacatacccctttgaacgcataggttttgcaaagaacaggccacctaaaaattaagcaactgtttaggagaaaataaaaagaatgtaatataatagtcttttactatgctgccatttatcaaggaaaatgcattttccagaacacctgtatggattgaggaacaagtctgcacacagtaccaacctactataaatattaggtttagcaatctaatataatttatttagtacacttaccattgtatgtgtccaaaggataagtggatcatgttgaggtatgtgaattgaaaaacatgaaccagcacattgctcacttaaatgcctcaatgcatttctatctctcaacatagcatttagaggttttgaataagcacagattcaataaaagccttttgagtgccccaaaaatgaggtaccttctgttatataatacttttgacctcttattcatttgacttgctaaaagaaacacaggtacatttcaagttgattcatttttaatgatatatccatacttgttttgaaagaaataaaacatgattatgttaagaaattcactgtgctgacagccacaggtccagaggattttaaatatattcctaaccaagagatcaaataatttaagcattagtgttctgctacttaccagtttctggtaacgactccttaaagatctctggggacatttttttacaatggttattcagagtgtttgacttgttattccacttgttatttatactcttgttctgtatactttactgagtgagtcactgagatttgcactttcacttacctaaaatcagactaagagaatatccaattggtgcctgagcccaagctaggccataacctggtacataaactgcttcagctgtgccattgatataccctcctccgacccaggtagctgaaacagaatgaaaagtgagggagtgatactgtcttacctgttatacctacatctgcctgccaaaccagtggctactagaagttactgagcacctgaaatgtgacgagcctagattgagttgttttaggaatataaaataaacaccagatttcaaatgttttttctttcattaatcacatgttgaaatgaaaacatgttgaatgaattgagttacataagttatactattaacattaatttacctatttctttttgtttttagaggtttgtagaaaatgtaacattatgtttgtggctcatattatatttctattggatagtgctgccctagatgttttctaaatgcattgagtcagcagcattttcatgatattatatgtaatatagtctgaggtcaaggagtacatttccattattcaacggccctcccatactccttgtattgatgtttttatactgtcctcacggagtggtgtgcatgtgtacgtgcatgtgtgtacacatgcatctatgtaggtgagtgtatgttggtagaaatgtgcttttcactaatagagtcttttcttgaacactctggggatatcagagcttgcaaatcttatctccatcaccactaagttgtacttactaccttaagttattaggagtgaagagaggatcgagatgacacttctactacaaggtgtccaaagtgagtttaaatgttaccttaaggcctagactacctagcactcagaagaaggtaaaatgtgaactgcatacatacttgcaattctatattttaatatggatcttttagtaagatatttactatttgacaagaagtaatgaaaaatgtcttattcagataaataaaatttatgtagcacaatagctgaggcaaggaggtcaaagaaccaaagaaaatgagttttgacttaacaggtttgagccaagaatgatctacagattaatatttttctctgaatagacaatgtaatgctagcaccattttctctgaggaaacagtataatattgaatccttgctgaaaaactaatgttgaagaggacactaaatctttgcagtttacaccttgttgaggttacagtacagtcaaaatattctaagcaatccttatacagaatttgtgtaaagttatgatggtcacaggttggtaataaaagtttatcagatatgaggctgaattctggattgcatcatcccattaggaataaaatttaactctgatgaattttccaaaatctcacagttagaatgtaagtaaatgaaataatatctatacaaaactacctaggatgtgtttctattgtgtttatggcaaaatttatctggcttttaatctaatacaaagcaaagaagagggagtcttagggttgacataaaaagattttcctacataggaattttgagtacatttaaatgaaaagtttatatacaaaatcctggagacaaatacatatttagcaatcactcccacctttgctgtagcttttaccctcagtgttaacaaataacaaaaataacaaatggcattatttgttttcttattctaagccctgctgaaatttttaaaatggcttttttttttcactgtgtgtgtaaccatgagctgaagaaatgaattcttacaggcagaaaacttgagactttatctttctaccaggcaactggaattgctaacacgtcaatgttttactgcataaagtaaatggtctgatggtcttacaagcacaaagctcattagtgatcattcgtcattgtgtaagtctactgtcccttgtccaaaaagaaaattggtgactgaatcattgcaactattgtgatatagaagtgagggcttggctacttactaagatttaaaagtcccctttataattgaatttagtctcttctataacagtatttgctctccttgtttgtatattttgtgtcagatccatgagtgagaacacaacctcttaaaatatattcatttttaaaagaatcaacattttttatctctattctttataaaatatatccaagtcaatcaatctgacaaggttaggtagtatggttcagattttaaatgaattatgatattgaccaaggttattttgagttctgagaaagaaaaaaaagttttacgaactgaggaagatcatggccctttataaaaaatagcatgattcaaatattttccgtaccttttaatagcttgttaggttgaaaaaaaccattctaaatggtaaaaacaaaatataaaatattatttttatgaccatattaaacagaatattaaatgagaatagtagagggctataattattttcaataaacaacatattttgatatgcagcagctttcttattctttctgcagtgtttacaaactgtgcaccttttgaaagaaataaagtgaaactagttacagggctgcatgtggcacagcatggggcggtcaccagcatgacgcagtacttgcattttggaactaagttaccggagacctgtgtttggttctggctccagccctggtccttgttaaccttgtaacccgggatctccacttaaccccagatgctcatcataatgccgttataaagaccaaatgagtccacgtacagtagatgaagagttaaacaaagataaaatgtcaatgtctgaaagataaaactgatggctcacatagaacactgtaagtttcagattgccaaagtcaaggggttcagaacatgaatggcctctccccagactggtttggtaaactatctgatatacacggtgaatcattttaaaattgcccttcgggactgaaattgggcatcacttgatatcatttcccatgggatatttttccaatgaacgctcacagttcttgctatgttgcaaatgtttaaaaactctactaagactgtataatgaaatatgtgttgttagtgcaactgtattaaatattaaacatataattctaagttgatgtttttcagaattattttcaacgaccaagaagaatataaaaaagaaacaaatcaccctttaaacagaaccactttagtgcaaagtaagaaagaatatcagctcctgctaacacaaagaaggtttgaatgagagatgactgcagatggtggcctggggattcctatgaggacacaccctagcttttcccttttataacaaggttcatgaaatctctttattagtgctgtggactcataacatgtgattgtcttcctgtgaggaattagttattaaatgaaagaattaggtttcaaaacagggaatcactcaattgggaatatcatcacccccaaatttatttatgcagattaaaaaccatcactagatggtattcattggcacttatttaaatctcaaagtcacaactttatgcatgtattaccggacacgttgagatgctgcctatcacattaattagcagatacatagcttgtaatactaggacagcttcccattcccccacctctttgtttttactctgtttccacccactcaatagcccagggagccaagatttgtttcatgactgttcagtccagtgatttattataaaatcatttttgttcaagtactactgagttgaaaccaatttatttttaggttttaaatcaatagaaaattattttaaaatatatataactagtgaacataaagaatccccaaaggacaaagaccaacatttgctttgtcactctgaagccacacgctgcacactcacagatgccaaggaagggaggactgcatggagccggcggcgtctgaacgtacctgtcatggtaaatccaccaaccaataaaccaatatctcggccaccaactatgatggcttcgctgcgctcttctgcgctgccactgtttttggttctccaggcagcccatattccaaccagcaaaattagaaggtagaacacgatgatagctatcagtccttccacatggaaagccatttttatctaatgatccagattcttctgcagctggctacttcattaagtcttctgaagaaaatacagggatgcattataaaccagtcaagcactatgcacatgtaggcagccaggaataaaccagctggctcatgcgagatcctgtgccactcacagaaagagtacaaccctgaaaccacacgtgaaacgggcagttaacaataagtgtccactacattatcctacttctatttaacaatttaacattattttgagtttgcaagaaacagaaaaaaaaacggaaatgtagtttaacaaatggaatcataatccttgtgtgtttcatacatgctttaaatttaaaattaaccttgtcgtgtatatcttaactcagtaactgtcaaatcatttacaaagagtagcgctgtatctgcgttttggaactaagttactcttctagaattatttattctagaagtgttaagtgtttcataaatgaccattctgaaaattttaaaatattcattaatttattcattcttttatctgtcctttcaaacaacttcagagaatggcttcagtagtaatctgatataaaaatatctgaaaaaaatctttagaaaaatccatttcaaaaacacatcaaactccacattttcaacaagtttctgtaattcaagttactatagcaactaagtatgttttttgttgttgaaaggatccattctcttgatcttcttcgcccaatatccttcattcaattcatcaccccccattaatggtacatacaggaaaaggttttgttgttgttgttgctgttgttttaaacacaattgcctaaaagcacatcagaagcctcaaagatattaaaatcaagactcttagaagacagatgtcaagttcgaaagcattcaccttctgaaattcttgtccccttttatttttatttttatttattttttacctttgtgaccacagctgttccatgaacccaaactctcacacacaagtttctgggggaaactctgacatttgtgcgtgcaggtgggtgaagagacgttgggggaaagaatcagcctctctggaatttaaaggaggcaaaagaagcgcccggcgctgctgtgtttctctgcctttgtgagcaaccaagcaggcaagttcctctccgcagcagcccgatgctctcccggccccctgcggccattcctcggccccctctacccatttcctgcgcccagactttgtagcctcttgcaccctgacagcaacggtgccagacagcaaacccgccctcgcatcccaccgagaggcaaaaacgccgcgtccctcccctctaaaacagcccgggctcggtgccaaggcgtttccgagggtgcgggcccgtagcgcaggaatgcccgctccgctcctacctggagtggtggctgcacgcgaaacgtccgcccggggccgccgccccctggaaccgcgagggctgtgggtgcgagggtgcagaaagggaggctgcgcggtgcgtcggggtgcagtgcggacgagaccgggcgatcagggcggatcctcactcggcgtctccaagaacctgggagcgcacagagttgacaggtgtacgcaccggcggaggcgcgcggcgcagggcgaggtgggaatcgatcgagtattgggaaaagtcccctttataagggcgtcaggcgggggcgatcgtcagacatccggaggcggacgtcagaggagagtggtgctagggcgtgtgctaggacgctgccctcgcgaggagggtgggtgtgcgggatgcgaaggaaacggggcccaaggagctggggggcaggctgggctctggtccgcgctgccagccatggtatccccatcctgagacaagtacctgctactcccatctcctcctccagaaaactgggcggagattccttagggtgattcccagtcgaacttctcatccctctggttggaagctgggaatggggagggtctcagaggattatattttcagaagcagcagctggaagcctagaggagagaagtgtcctgttcttttcttcccaggtcagagtctggaattgtttcctgacgagtctctctgagagggaaggggtcctctcccgcggcctcccctgggccctgttggaagctgttcctggcgtccctggtgatgggctccctgaaggagacatttcaggaaggtttagaaagtcctttttacattcatacccctgccacttaaaagtagggctaccatgaaggacactaggcgtggtccagattaacaatgaggttatcacagaagtcagacaagatggctttcctggtagagccctttgggcagctggcctgctgaatatcctattccagcttacaaaaatttgctgtgttagtttacaatatatccatatacctacctatttttatagattatttatatattacacatataaatatgtatctatagatgtatttctacatctaggtgtacatggatagatgcagatacctgtgtgaatgtgaatggaggaagagagaagggtgggagagaataagatagaagagtcacaagccacaaagctacaagcactctggccactttctcacttctttccgcattccaccatgagagtgtatttaacagtgaaatacacaagtctaataagggatagaataaataagagtgcctctgaactactgttcacctctctaggccaatcagaccatctccccttttcttacactggattttgaaattaacttccaaatttatgttactaccccttttctttcttctctgtataaacaataactgcatccaactacctcttttgagatgagaaagcctagggagttcaaacagaaattaagacgggccaaaaggcctgcaaagatagttatttcccctgggtaatatgactagttcattgattttctggaaaagacttaggttgccttttaatataaccccatttttacatacacattttattaatttaagcaattttaaggaactgacagagcgaaacagagatgggatttcatataattacccatgtgttttaaaagaggttcattcattcattcatccatccattcattcattgtttttgtcttctataactcattttctgattctgggccttagcctcaggttaactgatgtatttcctgccagaatatactaatgatgatgatgacacacagcttattgctgtagcaaggcaggcatgggcaattgcagtgtctgaaatagtgcacaggcctaaggtcagggagcttgactcagatccaaagagagactgaagaggcagccgtcctcagagaacatcaccagcctttcggtatgagaattgggagtgcagccaaagcacacctcccagagcccacctaatccactttgacaagccaggcttgccagactatggactcagtgccagatctgagaatggacaatgaccttgacagtggccaaattcttgcctggcagagcggctgtcctccatgacaagaaacaccagttgaaaatgacaactgctgatgaattgagtctagttctggggagacatttcctcatttgctgagtcctttgcgctccgtgtctgatctaaggatgaagctgcatgtgaatttctgtgccaaggtgtaatttcccagacacccatttctcttttgtctttaatattggtactttaatgtgtacctcttcctccactctcctgagaatatgttatcatgcacggacttagggaactacatgtcagtgggagatcaattcccgcttttggggagaaaaagcaggttttgcatttataaatcatttattttttaaaaacacattttctaagtgccttttacattctgaacactgtcctcagtactgagaatacatgtagaaaattatacaaaccttgccctcaagtaacttatccatgaaaagaaagaaggaacaaacaagcaaaagctgcacttctatatactattgtaagtgctgagaaggatgtagcatatctgtacacacagattctagggaaagttcaaacaaaaggtcttaatcagatggaggaattcttctcggaggagcagggagagtcatttattcaataaatatataaaaacacctggccgggcacggtggctcacgcctgtaatcccagcaatttgggaggccgaggtgggcggtttatttgaggtcaagagttcgagaccaggttggctaacatggtgaaaccccgtctctactgaaaatacaaaaattagccgggcatggtggcacatgtctgtaatcccagctactcgggaggctgaggcaggagaattccttgagccctggaggtggaggttgcagtgagccgagattgtgccactgcactccagtctggctgacagagagagactctgtctcaacgaacaacaacaacaacaacaaaacacctgctgctttgtgctaggtatatactcaattgattgaaatgaaaagatccctgtctttaataggttaacaccctctgaccttgccattcaaagtacacttcatggaacagcagcgtcagcattacatttttcttttttaataacagctttggtaatttgagaatgtcatcacttggtctatacattttgaacatgcttcaaatatgatccaaatgcatattgagactgtgggggcccattttgctgaagttattatccttcctaatgctccagtttccccatacaatgtcaactcaaatctttcatactttttaatggattacatttagcttaaattaaaattggccagtcatttccaaaccagggtgactatcggaattgtagagttcttgaaaaattgcagatactaaggccccacagcatgaattcnnnnnnnnnnnnnnnnnnnnnnnnnnnnnnnnnnnnnnnnnnnnnnnnnnnnnnnnnnnnnnnnnnnnnnnnnnnnnnnnnnnnnnnnnnnnnnnnnnnntgcaagctgtcagtgatctaccattctggggtatggaggacggtggctctcttctcacagatccactaggtagtgccccagtaggactctgtatgggggctccattcccacatttcccttatgcaacaccctagcagaaagttctctgtgagggtcctgcccctgcagaaaacttctgcctgaacatccaggcatttccctacattctgggaaatctaggaggatgttccaaaaccccaattcttgacttctgtgcattttcaggctcaacaccaggtggaagctgccaaggatcagggcttgcaccctctgaagacatggcctgagctctacattggtccctttctgccacagctggagtgtctggggcgcaggacaccaagactccaggctgcacacagcatggtgaccctgggcctggtatatgaaaccacttttttgtcctaagcctccgaccttgtgatgagagcaggggctgcagtgaagacctcagacttgccctggagacattttccccattgttttggggattaacatctggcttcttgttacttatgcaaatttctgcagccggcttgaatttctccttagaaaatgggattttcttttctatcgcattgtcaggctgcaaattttccaagcttttatgctctgcttcctttttgaaactgaatgattttaacagcacctaagtcacatcttgaatgctttgctgcttagaaatttcttcctccagataccctaaatcatctggtaccattttactgtattactccattttcacactgctgataaagacatacctgagactgggcaatttacaaaagaaagaggtttattggacctacagttccatatggctgcggaggcctcacaatcatgatggatggcaaagaggagcactcggtcacatcttacgtggatggcagcaggcaaagagagagcttgtgcagataaattcccatttttaaaaccatcagatcttgtgagacccattcactatcatgagaacagcataggaaagacccaccaccatgattcaatcatcactcaccagataccttacacaacatgtgggaattatgggagctacaagatgagatttgggttgggacacagagccaaaccatatcatattattttcctattccctgaagagtttcctttatcatttttctcttttctaaagagatgaggtctatgttgctctggctggtctcaaagtcttgaactcaagccatcctcagcttcccaagatgtggaactacaagtgcacatcaccatacctggctagcatttcttttagtgcaatcactcacaacacatcttcttaatttgctttcattgaaattgtctttattttgcatacattgttgaagagtatttttattggacatagaattctaggttgacaggtcttttctttcagagcatttattattttttattttactgttttctgacctccctgatatcttatgagaaatatatattcattcattttatttttccccatatttaatgtgtcacttttagtgagctcttttcaagaatttttattcaactttgtttttttttcagtagtttgattatgatgttatagcgcatgaaacatttttagtgaaaaaaacttaaatcagtggtgaattctttttccttgtcaaccatgtcttcttgtagactcttcagtgtttcttcatggcatctcaatttactacgtagtagactagatatgtgagtatcatttctgatgcctttctttttctcccattctcatttagtttttttctcaagcctgcctgtattttcatcacaatttctgtctattaaatcccttccacctattcattctataggtacatgaacattttttgagctctcataatgtgcctggcattgggttaggtattagtgctacaaagttgagtatggcattacataagtcaaaattcaaacaggaaaacagagctactctgagtattaaaaattaagggactttcatgcaggagctgattaaagagatgatggaagaactgaatatttaaacagaagacagtgaattgaacagagattagcaaatgccagatgctactgcaacctataggtaggagataatgtcatcagatctttgaggtgggatcatcaatggaacctgaccacctgttcaagagaaaaggagccatgaaggaagaacaggtgtgactgaagattctactagaggaagaaagtcatggtaagtactcctcctaccagggaaaggtggtaaatggatctacaagaaagaagcctggaacttacaagacattgaccttgttcatgagaaactttcagagcagtataggatgtagacagctaaacaggtaaggtgtgattcagaccccaaaatacactgaaaaaaaattgtacatataactgaggagctgattctgcaagggaggttcagggtaatgttttagcaatatttaaagtatgaatatgtttgatgtcaaagaaagagacaagccatccctagaaatggggatagtgtatgaaatgcacagaagcctaaaaccgcaggctgtgtttggggatctgccaagctttaggactgctgtctggtgaagtttgaggtcatcagtgatgcggaggggtgttggctgggggcagaaaatggtggattttctaaaacgtaaaaaactacttgggtgtttataatcaggagatttggagctttcaggcaatttgaagcagatgaatgacatcactggatctaaattttggaaagctctttttgataagaatctagtgtatagatccgaaaagttaagacttaagaaaatggcccagatgtataatgatgagacatggaattaagtcaatggcattgggaatggagagaaagaacagctgaggagagaggacagaaataacagaagggcctggtggccatgcacatgtgagatagttttggtgcctgcagggacattggtgccacaaatgaagaaagaatatccaggaagaagtgtatgcttgagtaggaggagtaacacatgagttctgtttcaaatgggcagtaattaaaatatctgcaaaaagttcactgaagctggaacaatcaatgataaatctggcttaaaaataaggatttgaaccaaccttgcatcctgggaatgaagcctacttgatcatggtggataagctttttgatgtgctgttggattcagtttgccagtattttgttgaggatatttgcattgatttacatcaaagatattggcctgaagtttttttttttgtttgcttttgttttgttttgtgtgtgtgtgtgtgtgtgtgtgtgtgtgtgtgtgtgtgtgtgtgcgtgtgtatttctgccaggtttgggtatcaggatcatgctggcctcatagaatgagttaaggaggagtccttctttttcactttttttttgaaatagttttagtaggaatgatactagctattctttgtacacctggtagaattcagctgtgaatccatctgatcctgagattttttggttggtaggctatttattactgcctcaattttagaactcattattggtcagttcagggattcaatgtcttcctggttcagtcttgggagggtgtgtgtgtccagaaatttatataatttcttctagcttttctagtttatatgcatagagatgttaataatattctttgatggttgtttatatttctacagggtcagtgttaatatccccattaccatttctgattgtgttaatttgactctcttctcttttcttctttattagtctagctagaggtaaatctatattattaacttttttttcaaaaaaccagctcctggattctttgatcttttcaatgtttttttatgtgtctctgtctccttcagttcagctctgattctggttctttcttccgatatctttggggtttggctgctcttggttctttagttttgatgttaggttgttgccttgagatctttctagctttttgatgagggcatttagtgctatacatttccctcttaacagtacctgagatgtgtcccagagattctgatacattgtatgtttgctctcattaatttcaaagaacctcttgatttctgtcttgatatcattatttacccaaaagtcattcaggagcaggtcattcaatttccatgtaattgtatggttatgagtgaattttgtagccatgatttctaatttgattgcactgtggtccaagagactatttgcagattggcttaacatatataaatcaataaatgtgattcatcacataaacataactaaagacaaaaactacatgattatctcaatagacatagaaaaggcctttgacaaaattcaacatcttttcatgttaaaaactctcaataaactagatattgaaagaacaaaactcaaaataataagagctatatatgacaaacctatagccaatattgttctgaatgagctaaagctagaagcattccccttgaaaaccagcacaagacaaggatgcccactctcaccacttctattcaacatagtattagaagttctggccagggcaatcaggcaagagaaggaaataaagggtattcaaataggaaaagagggagtcaaattatctttatttgcagaagacatgatcctatatctggaaaaccccattgtctcagcccaaaagcttcttaagctgataagcaacttcagcaaaatatcggattataaaataaatgtgcaaaaagtgctagcatgcctgcacaccaaaagcagtcaagctgagagccatatcacaaataaactcatattcacaattgtcacaaaaagaataaaatacctaggaatacagctaaaaagggaagtgaagaaattctacaaggacaactacaaaccgctgctcaaataaataaaagatgacacagaccagtggaaaaacatgccatgctcacgaatagtaagaatcaatattgtgaaatggccatactgcccaaaggaattcatagattcaatgctagtcccattaaactaccattgacattcttcacagaactagacaaaactattttaaaatttatatgggaccaaaaaagagcccaatagccaaggaaatcctaagcaaaaagaacaaagctagaggcatcatgctacctgacttcaaactgtactacaagactacagtaaccaaaataacatggcactggtataagaacagaaacataaaccaatggaacagaatagagaacccgacataaggccacacatctacaactatcagatcttttacaagcctgacaaaaacaagcaatagggaaaggattctccgtttaataaataaatggtactgggataactggctagctctatgaagaaaattgaaactggaccccttccttacaccatatacaaaaatcaactcaaaatggattcaagatctaaatgtaaaactcaaaactataaaaatcctggaaggcatactaggcaatactattcagcatataggcataggcaaatatttcataatgaagacgccagaagcaattgcaacaaaagcaaaaattggcaaatgggatctaattaaattaaaaagcttctgcacagcaaaagaaactatcaacagagtaatcagacaacctacagaataggagaaaatttttgcaaactatgcatctgacaaaggtcttatatccagcatctttaagagtcaaacctatggaaacaaaaaaactcaacatcacggatcattagagaaatgcagataaaaaccatatcatatcacaccagtcagaatggcaattattaaaataaaaaaataacctgctggtgatgctgtggagaaaaaggaacacatttgtactgttggtgggaggacaaattatttcaaccactgtggaagaaagtgtggttgtttctcagagacctaaagacagaaataccattcaacacagcaatcccattatttggtatatacccaaaggaatataaatcagtctattataaagacacatgcacgtttacattcattgcagcactattcacaatagcaaagacatggaaccaacctaaatgtccatcaatgatagactggataaagaaaatgtggtacataaacagaacgaaatactatgcagttacaaaaaagaatgagataatgtcctttgcaggtacatggatggagctcgaggtcattatcctcagcagactaacacaggagcagaaaactaaatactgcatgttctcacttataaatgggacctgaatgatgataacacgtggacactttggaggcaagaacacacactggccctaccagagggccaagagtgggcggagggagagaatcaggaatagtatctaatggatactaggcttaacacctgggtgatgaaataatctgtacaacaaatccccatgacacatgtttacccatgtaacaagcctgcacatccagctcatgcacccttgaatttagaataaatgttaaaaaaaaaaaaaaaggatttgaagaatatggggcgtaggtcattgtaaactcccaaaaggtggatggaatcacacagtgaggatatttatgaggaaaagggccaatggcaaaattttgtgatcaagaagtagtgagaggaagggactctagcaaaaaaggggcccacagcacagagtatggggtgttcagaaaacctggaagatggagtttaaggtcagtttcattttaaaagctcctctagagagtctaatatgcagttacatttgagaacaactggactaaaatggtagagctcaaactttggtgtttgtgaggactatccagggatctgaataaaatgcaggttgtgtttcattaggtctaggaaaggctcaagattcttcacttggaccaagttctgtaaagctcctggtttaaggatcacattttgaaacacaagagtttactagacaatcatgtaatgtcttccaccatacccttaggttgtggtattttatctaccttaaagaatgtcttccttggtacctgtcccagtagatgggtgtgacttgtcaccaggacctaacatctcctgatgtggcctcaagacaaggttatgctttgtccctaaatgctgccctcatttggtctctagcgtaggcatcatgcttctctggttctcagaaacactgcccataaagatgaacttattcttgagaagccagtgggagaaaaagttctggaatatccttttattttttctatgattgagtttcttccccattactggtccttttgccctaagtattataggcatgaaggtcatgatagaattttcttctgcaggtaaaactactttggtctttcctctggttctagacaataaccaaaaatgagttttgtctctgccttggacaaaatgcagaattgagccctgctgccagggggcatccttgtacagcacatctaactggatccaagacctctcttcatctgactctcacccacctctacctatggtactatcaaaaacaaaacaaaacaaaacataacaaaacaaaaaacaaaaaaaataaaaacagaagaaaaaccaaaaacacctttcccattaactgtccatggcataagtcagggtataggcacacactcgcaaggcctgcctcaaggagctaaaggcagcaaacttcatgctttccacttcgttgcagagtctgcccttgaattttgatatacatgatactcaggatagggaagctgctgtcctgtgcttctggagtccaaagcaaagactctggaggcatgcaagtttcaattttcctgtgtttgttcctggaaaacatgtagcatccagctcactgagaccttttagccacacaatgcatacatagcacatgtgccccttgaggactggaattcctgagggttggctctgcatgggctagaattgatgctgtttggcacctccaggcaggaaggtgaagatccatgtaacctgcctcgtagaaccccagggccccagttcatgctatcaattgttaaccaagagcaggagagacaaactgtattattgattacctgtgtactggttgagatgggttttagccaagttggaacgtatcaggatggtgagattttgactcagaaaggattttctacaggcattggctatatgctagtaaggtagtgagtaggcacttaaaatttcagagaagactctaagtaatgccgccagaactcagcagtgtggctgtggatgttcttggagtcacagccatgggtgagaacagtcagaggtagtcctggtctgtgtgctaaagagaaaaagggatccgaagtctgtctgagacttggccagctgcagctctaaagagcccaagtatgaaaactcagggcgtttatccaagtgccagggtggacccaagaaaaatgagatggggcacgagactgcagaagaacagggagatttcttggggtcatggaaagaggtggggatgcacctcctgagaggtcatagtttagaaactacaggaatcttatgggctgctgccacggcctatttgtacagcgacctcaccatgcactgggtgcctacttctgaggctccatcctggtgccctcatttcccagctgtgtggcctcggggtattcctttaagctcactgccctccagtgtctcatctggaacatgggatacaggggagtgtttaagaagttagggatatgtgaaggatggagcagtgtcccgcatagtgtgattgcttaatagatactgcttgtttctattatcgtgggttgttattccttacaaaagataaataatagctatgattggctataatagtgaatttttatcttgcttcttaaaataaaattccatacccctcagtgtaccagtggaagtggtacacttcctactggcaggaatgggcagttggatgatagaactgtccccaacatctcttacccctgagctcacctcttctatcactcagaccccaggcagacgtagtatagggacgtttcctgtaccatctgcctctgagccaagagtggatccaaagttctccgatctttcagcagaaacagtagaacctacgaaacttcacctataggataataaaggggagatagatcatgaatgtaaaaaaacacaaataccttaaaaatataattttctttctgaaacttacgggtctccatttcaagtaaagtttccaccatgttaagtgagatctcagaacaaacagagatctttgtgcccactccttatggctgccctgcctccaatgtcttcttgattgctcatctctcaaaagtcccttcaaagatatctctaggaagtgctccacccacttccagccttctctcctgatttcccctttttattctgagctatttttcgtgcaagtgacctctactaaaatataatgagggcattctactgtgcactccaaaacaactgtgtcagaatgtgtctgataggtgagttcttggtctgacttcaagaatgaagccacagaccctcgcggtgagtgttacagttcttaaagatggtgtgtccggagtttgctccttctgattttcagatgtgttcggagtttcttccttctggtgggttcgtggtctcactggcttcaggagtgaagttgcagaccttcacagtgaatgttacagctcttaaggaggcacatctggagttttttgtttctcccatccacagttgttcattcctcccagtgggtttgtggtctcgctcgcctcaggagtgaagctgcagaccttcgtggtgagtgttacagctcataaaggcagtgcggacccaaagagtgatcaagagcaaaatttattgcaaagagcaaaaaaacaaagctcccacaccatggaagagaacccctgcaggttgctgctgctggctgggcagcctgcttttattcccttatctgactcccacccacatcctgctgattggcccattttatagagagctgattggtccattttacagagaactgattggtccgttttacagagagctgattggtctgtctcgacagggtgctgattggtgcatttacaatgcctgagctagacacagagtgctgattggtgtatttacaatcctctagctagacgtaaaagttctccaagtccccactagattagctagatgcacagcactgattggtgtgtttacaaaccttgagctagacacagggtgctgattggtgcgtttacaaaacttgagctagacatagagtgctgattggtgtgtttacaaaccttgagctagatacagagtgctgattgttgtatttacaatcctttagctagacataaaagttctccaagtcctcaccagattagctagatacagagtgctgattggtgcatccacgaaccccgaactagacacagagtgctgattggtgcatatacaatcctccagctggacataaaagttcaccaagtccccacggagtcaggagcccagctggcttagcctagtggatcctgcaccagggccacgggcggagctgcccaccagtcccgcgccgtgcacctgcactcctcctcagcccttgggcagtcgatgggactgggcgccactggggaggcttgggccatgtgggagcccaccacgggggggctcaggcacggtgggctgcaggtcccaagccctgcccacagggaggcggctgaggcctggtgagaattctagcgtggcacagcgtgggtgggcagcagtgactggggcctggtgccccctccacagctgctggcccagctgctaagcccctcactgcctgggccagcggcgccagccagccactccgagtgcggggcctgccgagcctgcgcccacctggaacttgcgctggcccacaagcgcccgtgagcagccctggttcccgcccgtgcctctccctctacacctccctgcaagcagaggaagccagctctggcctcggccagcccagagaggggctcccacagtggggcggtgggctgaagggctcctcaagcatggccaaagtggacgccgaggctgaggaggcgctgagagcgagcaagggtggctagcacgttgtcacctctcaagagcaccacagcaaaggcatagtggctccacagtcagaattgtgtatacagcacaaccaagttttgtcacaggagccaaatgactttctttaatttgcttaagtattcactgagaaaatatggttataatgtatattttcattgacatttacaagttcagagtctagtgatgagaactaaatttattattccaaaaatacgtaccattttaatctagatttatgctattgtccagattcactttcttcctggcccgttggctatgacacacaggtgtgtgggtaggtagctcaggttccctgggtggcagacattggcatgaaggggtttcttgttgacgttgtgcatgttaatactcaattcagtagttagagatcatctactttgtgccaggcattgtgtgagaaagtgggtaatggagaggacatcagtcagacctttgtggctgtcccacatcttttgcaaattacctgtccatttgacagtctctccacctcaccctatggaaatccaacccataatacagaaaatatgttttctagccttcttgtgagcacacacctccttttagactttcctgggagaatcgggggcttgtcctcttcacacacatggagtatttcccatttccttcttccaggggtgctgacacaaagcctgacaggcctcttggaactgggatcaggggacccttgagccccttaggcttctcatacctaaaatatcattcccctggggttttgtgcttcctccaccaaattccttcttctattctatgcagtttaagtatatttcatttatcttgtaatctgttgtaatcctttacattttcagaaaattaaccctggttgttatttaaagaccctatattctttttggttttctagattggaagctccctgttcacccacacctcatgttgtaaggcctagagaatccattaggattatcccactctgcatctccattttaaaacattattcttcctcttcaaagcattctttctctttgaagatcaaagccttcctcttatcatcattcttgttgcaaaaactgacaaaaacttcctctgactcgccctcattcattaaggattttggcaataggctttcaatctttctccagtgaaccaatgtgtaacttcattttaactttacataattttagcttcctgctttcatggctacattctggatttataatggcccagaactttggcacaactttttagcctagacatttacactgaaatgttgcaggaccatattgttttttctaaatgtcaaccgttttggccatctgtctgggaactattagtctacaatcactgtgcaaacttacatgaaccaagataacatctccaaaatataattagcctcaatgttttatttaaaaataaaagtaatatgtttttcataaacaaagtgggcttatttttacggctagtttccaaagaaagtcatactttaaggcttactgccaatatttatgtatcataattttgctttctattttatatactgatattatagcctgtagtgtagaaaataaaacaacaacacatctgttgttttctttctttctgcctcttacctttgggattaatatacatgctgaaaggtaacagtcagcacatgcagagcgtgagagcaatttgaatgtgtttgcacaggcatacatcttcatgcctaacaaaagattccctctggagtgtgtgcgtgtgtgtgtgtgcatgtgtgcatgcatgtgtgtagacagtcttataaaatatattctgcagaagaaattacattttgaagagaaccattcttttcactgccctggaggatcagggttcaaaatgtatccagataaagaaggctgacttcttcccttgagccatttgccatctctatgctaagcaaccttagtatttgaagatgttttgggcaaatgcagccttagcctcactcagcgctgctctgttgcccctacctcctggggagcagtcatccatgattttggccttcatcctgggaagttatacgagaaaagaaatgtgtccatgtgacagctctgccatttatttgtctgtccctaggccggtgtttagcctctgtaagagatgagcctattaagaatatactctttcaatgtcccccaggaaacatttttctatctctttgccattctctgctaagtatataaaggttaaacagttcatatttagccaagcttctagttgtgtgttcagtggtgtccttttatttttctttaagcctacacaccagctcactttggtgaaggtgccctttagtaagtacagtcattagtgcattactggagcctgttggtttagtgagtgattcacacaggcacttgggtccttgggctgacttacttcagggtgaaccaaaaaaaaaaataaattcaagaaactgcaaaggcccctagttcagaaaatacttggaggtggaagacatcgactccaaagcctcaagttagggctggggctatttatggattttaatttgctgttaatatctcctgcctccttgccattttggtgtttaatgccgtggcagagttccaggagttataggaggtacactgctgttggaaccccagaaagccgtatgctatgagtttcagcaacagtattacttcagattttctgaaatgtgtcaagtgtcaaaaaatacataccatgttaacataatgcaaaattggccacagaagcaggtagatctttaatgttttctcctttaggctaaagtttcagtttctcaataaattacccttgtggaagaaaatatattgccagtgtctctatgttgattcattgtcaataagctaacagcccgagatggataaataattacaggagtacctctgtatctttatctttttgcattactgagaaaatatgaaactataacagttttctatacacatatattgaaataaccacaattttatatttatataaattatatttctgtggctttaggttgcaattatactagcagaagcatatgtgtgcaatttttataacaagtattacataacaagagagtgagactttaatacagtagaaaattaatagaggactaaaaattaagattattcaggaccaaagtggctgatagaattaaaaagaaacttgcaacttctatttgtcaaatgataatcggccttacaatctcatcctctctgtaaattgaacaaaaatgttccagcaagaaataacatctgaattaaagggtgtttgtaagcccagagcgctggtatctacttcagggttctatttcagtagagtaggttattaaatttgaagaactagccagcaggaagctacagtattttctgaagagttaactgaagagtcaagttttttttttaattttgcacaaaattatgacctataggtctatctagcattaactggaggtgagcaagcctgattgataggctcgtttaaaagggagtttcataacctgttggtgaatggaaccagcagcaggaggctgggggaaggacttggggcaggtttgtcttccaggactcaaaaataatttccttcttgaatcatttaaaaatatatttaactattaactgaattaaattacctagatacagccggccctctgtatctttagtactgcaacctcctgtttcatatctgtggattccacatactaatgaaaacaataaaaaataataatacgagaaaaaacaatacagattaaaaacaatacagtattacaactatttacatagtatttatattgtattagatattttgggctatttagagatgattacataggttatatgcagatactacatcattttagatcagggacttggattttactatcgtgggggtcctagaagctgatcccacatggataccaagggacagctgtatttaatcttaaggttacttctccagtggtattaagtccatttactttcgatagtgaatttagggagctttatattaaaaagggctgagtacccaggaggtgctttcaaagcaccaccttccctggaggatgcaacagctgtgagccaccccccagcacctctgcaaaaccatgatatatctacagacttgcctatcatcacaatataattttagatcattttaatcacttcaaaaagacaactgtgctcagctacagtaggccctcactgccattcccaggcccagacaatcaccagtctactttctaatgtacatttgactttctgcatacaattaatataaatcgaagtacacagtgctttattttttaatatggatgatagattatcattattgtggatgtatattacatgtttttatatgtgatacagctcttagtaaataaatacaaaaaccataaaaataaaacagtcatgtgtttatgagttgaaattttcaattgttaattatttttaataatgtttttcaaatttgcttcaataattcccactggtaatgaatgcactatgcacaaagcaactcacaacctcttagttttgtctgtaaaatgggatgctgtgaagattaataaaaacagtgctaggtacaaaggacattgcaaacagtaaagaatcattatgacaatgctgttgtattgcttctatattttttcatcgacaaggccaattttcaaactagaaggttggaataacatgattaagagagatgtggaaaccaggaactaatcatagaagagtatccatctcttttaaaagaattataacttaggaggctaaaaaacaacatgtgatcaaagactgtggtcaggctctaccctacaaaacactgttactctgcatttgaatgaagagacacaggaggtattttacctaattaaattgagccctgaaactgacattacatttcagggtcatgtttttatctttccttttatgaatctaattaacagaaaataatcactcatttgctgactgttcaagccttgctcatggagacctgggaatatgggtatgtaacaaatatctttggtgattctggttattagagacatttgggacatgacacctaagtcttatttgtaaggtgaatttgctgactggggaaaaaaaaaaaaaacagcactctatgaatcattccaagagtcaaagcattatattgcagtaaaaaggaaacacaggtatttggaaagtgtctcaaagaaaatgctgagtctgctacttaaaacttttgtgtggttgggaatggtaccttcactccctcagctatttaacaaaggtggatactattaactctctctgccagcctcctcaaagttatgaaggtagatacttggcaaagacacagtgagatcagcatttatttgattattaaaatgacagtttgcttgtggtatagacgtgattggattgtatgtacagcagaaaggtcacggaccagagaatgtaactatgttagattgagccagatttggtagtgcctttggagctgacaattattacttgtcagaagaacagaaatataagcttgtttctgttgcaaatgttctgtgttttttgaggcatctccaatcctttcctcattgatggggcccaaggctgctgctcagttgagtgaggagacaggctccacttgggagtcactgcatagtctgaggcctgggcctcttgcaaaggactgatcatggttttgcagaggtgctggggatggctcacagctgttgcatcctccagggaaggtggtgctttgaaagcacctcctggatagtcagccctttttagtataaaactccctaaattcactatagaaagtaaatggacttaactaaataccactggagaagtaaccctaacattcaatacagctgtcccttggtatccatgggggatcagatagtaaaatccaagtccctgatctaaaatgatgtagtatctgcatataacctatgtaatcatctctaaatagcccaaaatatataattaaaataaaaatcattgaattgtacaattcaatgtgcaattcaaaacaacactcttgggaagcagagtggaaaaattgggaaaattagtagtccaataccatgtcagcactggagaggctgatgatggaaatcaacctcaattaacgattaaatgaaggaaaattttgaaattattatagcaaggaaaataatttgaaaatgttaacaaattctctgaatgagtagcagattaacaaaaagttttcaagaaaggacatttttgaaacttctaactcacatctccttgaatggtattatatgctctatttataaacacaataattgtttataatcctcttacttagcaataggtcagatttttttttttttttttttgagacggagtcttgctctgtgaccaggctggagtgcgatggcgtgatcttggctcactgcaacctccgcctcttgggttctaggactctcctgcctcagcatcctgagtagctgggattacaggcacgtgccaccatgcccggctaagtttttttttgtatttttagtagagacggggtttcactgtgttagccaggatggtctcgatctcctgacctcgtcatcagcctgcctcggcctcccaaagtgctgggattacaggcttgagccaccacgcccagcctaggtcagaaattttagcagtcactgtaatgaacatccaagtcacaatagtttctctacagctttagcctttctatgcatcacaaaactatttaaagaaaaaagcccccaagaagtgtggcccacacttataattccagaactttgggaggccgaggctgcggatcgcctgaacacaggagtcaagaccagcctgggcagcatagtgggatcttgtctctaatttaaaaaaagagagagagaaagaaaagctaaattacatagtcttattttaaaactatattttaataaaattatttttctcaattaagcagctcttatttttttctaatgatgtaaactaatctgttggtgaaattgtacctatcattgtttccgaatgaatactatttaaacaagcataaatgtatatattaaaagtcactgaagaaggtaatacattataaaaccttaattgataaagtgcttgaggcaatgcagggagtaaatggtaaaattagtcattttgttcagaatattttttttagtatgttttattaaataaaatcagaatgtgtttcccaaaaaataagaactctctctttcacaacaaatactgttggaaatattactatcgcttgatctttgatttccaccagtacctaataaagttgtttttcagattcataaaacttaataaatgattctctttcaatcccagaaatactcttgccagccttaggggctttcttgcttggttaaccaagtatggcgtgtgtttgttggaaagtacctggacgcatgctgccagcctatgagcttactaatatctcattgaggaaagctatctgaggtccttgaatctctacacatctcaacgttttctaatgactgtgttaatatgagcaaaggtacaggggctggcttctgttcacatttgtctctgtatgatcaagaaccagtggagaaaacatgttcagtttcatttcttcttacttctaattggctgaaacatctctagtaagcaactatattcatttcttcttagttccaactggctgaaacatctctggtaaacaactataaagacaaaggcagggaatcctatgcgttgcctccatcttcttattacatttttgacgcatttaaaaggatcacaaattaggacacttcccctgaattatttgaaggtttctatacaatctgtctgaaatcaacagccttttactatgggcaaggggccagacaaggtaagtaacctccaaataaatgatggatgagttcatgtgcttattgaggctgttcccttggtgaggagggaggattaatgtacagaatatggaattctataactatatgggtgaggacagtagtcagtcttggataagcaatgccttttacctggaaagttaaaagcattcctctaatttgttttcatcattctaatttattttgttaattgtttggattttgtaaccatttctaaaatatggttttagaaaatgtgagaaagttgtactctagaacattagcagaattgacatgcccaagtattgggaaagtaggttttgacacaaatggaagtggacttttttgtaggcttaccactttcatcctactgatccggggtactggatgaagatacagggttgaggcagacttgagattacagaatcctttcaacctaaggaaaaataggcaagacaggtttgcaaagaaatcctggtcagataattggaagggaatatgtggagtggaatataattgtctctttgggtagatagtaaaaatgcaattgctggaacttttttttttttaaccagaattatgggaaagggagagataatttgcacactgtatgtaaataaaaattttttttaaagtgtttgggggaagcggagttttttcacaaaaaactctatgcgcgggatctgtgttgaattgtgaggcactgtttaatatgagagtgacagcatgactcagaggtggtgtgtactcctatgacgtggttatgcctcacaagtgtagatactaggagcgaaccacgtatggaaaaggggaggtactacggcgaagtatatctatatgtaggtacggtggagggactccttcgatggacgtccgctcctgcacgacgacagagacgnnnnnnnnnnnnnnnnnnnnnnnnnnnnnnnnnnnnnnnnnnnnnnnnnnnnnnnnnnnnnnnnnnnnnnnnnnnnnnnnnnnnnnnnnnnnnnnnnnnnattgaatattgactttatgccagaaagagaagtagcagtaatctagccaaaagtatgcttccagcttctcctccaaccactccctcactcacctctcatcataccaaatacccagtggtctcaactgcctggtcgctgtcattattttcttttttcctattagtttctctctcaggtactctcttctccctccatctccacctgtggaaatgctctcaaagcctatggacaatctgcacttcatttctgcaggttttcctgttaacatgcagctaccctttctctcttcttaccacctttttctcatcacaaataattaatggtttatcattttaattcccatacagacctctttatatcatgcaacaaattgcattatagtttaaacgttttttattgtatatgctcaataagaaatttaagcacattccaatataggtatgtatatctatcagttgcttatatattctgtactaacgtatgatgtaaatcatttaataaaagcaaccatacaatatttaggtacaaagtaaaattaatatacatagaagttctagtatttattatttgatgccggctgtattgccttgagcactctgcaatgctcactgcggaaaacaccacatacattgactctcatagtagaaagtaagttccagggaaagaccatgccttattcatgtttttgctcttacagccattacattgcctggcacatgattggagtgtataaatatttttgggttgcattgattcaggttaaatgtcatactttcaaaatcttaattattttctgagaatattttatgatggttagaaccaccagatgataacaaattgaaggcctctggggtagtttaaatacagttcaaaataggtaaattaatgaaaagaaataattgctgtatgtaattatagagaaaacttcaggaaattctgcataattgaaagttgatgatacattgtcttagttcagttgggtaacaaagcatcataaacggagtggcttataaacaacacagatttatttttcacagtttttcacatggctgggaagtccaagatcaaggtgccggcagattcactgcctggtgaggattcgcatcctcatagaaggcaccttcttgctgcctcctcacatggtggaaggaaaaaaactcctttgactctcttttataaggactccaccctcatgggctaatcatctcccaaagttgccaacttgatacctaataccatcaccttggggatcaaaatttcaatgtatgaatttagggggaacataaacatcagatcatagcaaacataatgatactaattgatatttgtggctacatgccacattttttttactacttctaagttgtacttaggcctattctaaatgtgattgcaataaaactctttaaaaaaatgaatagatgtttgcctctccatccttgtgtttcccgcacagatgctgggtggaatcccatggcaagcatactttcagagggttctctcttcttcctcagccacctatgctcaagtgctgtccttcctggcagctttcgggtgcctggtgatggccatcccagccatactcattggggccattggagcatcaacaggtaaatctcttgcagcttcaccacatgtgccagttagtttaccaatccccacccagacacccttctgtcccactcccctctttcctccacatagtgaattctttctcaccacattcatatctatagatttgttatagcattcagtaaatcgtattatagttcagcggcctccatttttttttttttttttttttttagtagagacggggtttcatcatgttggtcaggctggtctcaaactcctgacctcaggtgatccatctgcctcggtctcccaaagtgctgggattataggtgtgagctactgcgcccagcctccaatttttttgattgctcactccactatgaaacattggtgagcacaccctcctcccagttttggtatatttatccattgtttatatgcactcctgtcagcagtggatctcaaccaaggtgcatgctgacatcatctggggaatggtggggagatcttttaaaaatacggatatgtggcctacttcacaggaattttattttaataactgaagatagagatgggcactagtgttcttttaaaacccctaggtgagttgagagccagagttgagagtcacaggcttagagacgtttacctgtcatcctcatgacctccctaaagatcactttgaacttgagatttctgctttacacctttagtagtttttaattaggggttttctttcttgaagaaagtgatggataagcatttaggtcaagacaaacaaacaaagtcacttagagaataacttattaaaaaatggttttgaaaaaagagcattatgaaatgtttatctccctgttagcctctatgtagaacatgttcaaaagctcacctttaatttaattaaatgtattaattactcctgacctttatgttcctgtgctgtaacttttaagagcacttaatgaaaatacatcatgttaatccaaattcaaaggcatcttctacgtagaggtaataaaatagattaaagttcaccttttgccctgtggtattctgtaaaggtgatccagggtgatgttcctacagcaactttgactttcgattagtagagtcttttattggattgtttaacttttaggagagcagtcctggttcatagtgtacactctccattccagttgttcatccaggagacagacacttcaaaaatgtaaagatgactgacgaaggtggtatgtagtgtttgtctctgaaaaaaaaagatagtatttctctcacaagcagaaaacatatatggacgtgtgtgtgtctgtgtgtgtgtgtgtgtgtgtctgtgtgtgtgtgtttattgtaggaacacaggctaacagaaacagcattaagcctattttttcttggattagatacacattcttgtttgttatttctgttatcataaaatctcagttaaggccacaaagttgcctgcatgtaagcaggctttggtgacaattgtaatagaaaatgagggaagaaaaaatggtaggatccaaagagaacaattcctatttggtccaatgatcatgatattaaaaaagttcagcaaataaaaagccgactatgctaatgaacatttaaggattccatagttcttcaacacatgctacaactaaccagtaaagaagctatgtattcaaagataaatctgtgtttcaagtcttcttaccctacccacaaccaaaacttcctgaaaatttcagccacatgactgtaatttttattcaataaaaagggactgttcttaacctagtgaaattctatgcaatgtggaaataggagaaaagtaatgctgaggcagcttcaaaaccaagtttatgtacagagagatgatggctgagaatagccctactattgtctttcttcatttacacatgaataactgagccttaaagaagaaacagtgagtgtcccaccacatttccaagtggttgaaggaatactctagaattctgtttatgagagtttgttttctatgattctaggcaatgtaacaccatcattgcagaaaggaaatatatatcttaccaccagtgtctgtgcaggcattgtgaataacactaactataaccaataccttttagaagccaagagatataagacatttccacttgaccagcacatggacttcacaccagactaatgtatatgattctgagtttatttcaaaacaacctagtaaataggatgaccccagatggataaagaacatttggttccttggtggttataatggttgttgattctgttcaacagactggaaccagactgcatatgggcttccagatcccaagactacagaagaggcagacatgattttaccaattgttctgcagtatctctgccctgtgtatatttctttctttggtcttggtgcagtttctgctgctgttatgtcatcagcagattcttccatcttgtcagcaagttccatgtttgcacggaacatctaccagctttccttcagacaaaatgtaagaacagtttctttcaacctgacatttactagcattgctcttgctgcttctgatgttgtatttgttgtatatacagtattatatatttattaatattctatgttaaatctgactgtactttaagcatacgagattaaataacaaattatacctatgctgaatggatgctatcagtacctgttcttattcatgtcaatactaaagggaacaaatcaatataattatttcccaagaggtacagtcacagggctatcatttaacctttttgtctttctgatgaaagagtaatgaaacctaaactattcagcaaaacttttagtataattaaattctctatgacactggaaaatcttggtggaagcagggcatggtaagttgttcgacacgtatttttgtaacttctgaactgttttatacttgcactccaaagtccacctttgcaggaagatatcctctcaatttgattttctttattgaatcaaagtggctgcaaaacagcatgcttcttggttgattaaagcttttcctctctctaggttttagttaacaaaacaatcccagtgtttttgcttttgctttgttttgttttgattttatttgattttttttaattaaccaaaggaactccttgaacaaggcattttctttttgtttttaattttactttaagttctgggatacttgtgcagaacgtgcaggtttgttacataagtgtatgtgtgccatggtggtttgctgcacctattgacccgtcctctaagttccttccttgcaccaccccccacgccccccaacaggtcccagtgtgtgttgctccctccctgtatccatgtgttctcattgttcaactcccacttatgagtgagaccatgtggtgtttggttttctgttcctgtgctagtttgctgaggatgatggcttccaccttcatccatgtctctgcaaaggaatgatcttattcctttttatggccacatagtattccatggtatacatgtgccacattttctttatccagtctatcactgatgggcatttgggttggttccatgactttgttattgtaaatagtgctgcaataaatgtatgtgtgcatgtgtcttttcaagagcaccagaaggtggttagtttaaggatggtagcacttctacaaagagataaactagggatggcctatgctctgtcaatgccacataagaactgttccctaatatgtaaagtgaggaaatcttcccttgctttattatacctccctgacaccatgttagctcatcctgcctttgcccctgtgcattcaggaaaaggctcaggtggcctgtgtgtcatgcatctggtacacagaaacccctcccaaaggtccacccaggaagtcaccttgattgtttgctttgggtgctgtagctgtagttggtttttcccatagattgagccatttgaaccaggagaattctttagaccagttttgaagcaaaaaatatgtctcattctttgcctaaatgagccaagacactgtgcaaaaagctgacactgtggcaatttcttacaggcttcggacaaagaaatcgtttgggttatgcgaatcacagtgtttgtgtttggagcatctgcaacagccatggccttgctgacgaaaactgtgtatgggctctggtacctcagttctgaccttgtttacatcgttatcttcccccagctgctttgtgtactctttgttaagggaaccaacacctatggggccgtggcaggttatgtttctggcctcttcctgagaataactggaggggagccatatctgtatcttcagcccttgatcttctaccctggctattaccctgatgataatggtatatataatcagaaatttccatttaaaacacttgccatggttacatcattcttaaccaacatttgcatctcctatctagccaagtatctatttgaaagtggaaccttgccacctaaattagatgtatttgatgctgttgttgcaagacacagtgaagaaaacatggataagacaattcttgtcaaaaatgaaaatattaaattagatgaacttgcacttgtgaagccacgacagagcatgaccctcagctcaactttcaccaataaagaggccttccttgatgttgattccagtccagaagggtctgggactgaagataatttacagtgaccccatctaaataaaatactgcttttgcaaacagaacactgtaatagggtagttctggagagatggtatgcagcatacaaaaatatattaaaaatataaacaatgttcaggagagtaaaaattcatataaagtgcaattgcacaaatacaagccaagctagaaggaagcacctatgaaagcaacaactttgtttctcatccatagtagtattgattttgatgctagatagttttgctaggtataaaaaataagtaaagttccacttagagaacaaagggccaaatagagtttttatatttgttatgataaaaggaagtagatgtgaaaaagcctaagaaaaaggaaattggacagttttgatacaaactttgtttgctaatgcactgatgagtctagtttcattatagcacgaagctatgagaataacttcagtcactcccttgaatggtgcaatgaattaaccagctgatttttcttagtgtgatgattaaccccttctttcatgttctgagctataacatttgctgaatatgcaatttgttattcttttattaatggcatgtaatattctgagcacgggcaaagaaaacacacaaaaaattatgtattggcatttatttatgtgcaaggtgataggaaaactgaatccatctttgtagaagagcactgggctaatttgtatgtttccatagctactatatgcataaacaacagtacctgaaggattattaagcaaccttaaagcaataagttcattaaacagaaggtaataggaagaacagtacatttttgtctttatctcaagtatataaagttttgccccatgataaaataagtaacatataaattaatacataagttaatattggaagtgaaattaggccttatgtaaggagaggtagctacacagcatctgttacggttaatgagaggcacactgctaaatttacgtatatttcattgaatactttatgggaagcctccacaacacctcctgatagtagtaaaattagaaaaaaacaaactctactaatttttagatattcattaataggaaagatttaatgttacagcatctactctttggcactttttcacataagccagccttagagactagacaaataactactgcaaaaagtacatagtgaattttaaaatgtagaagaaagcaaaaaataaaataagtcctaaagtgaagaagccatcaattttaacatttgatgtctagataacattcatgagattggtcattaaatactattttgctccttttctggtgttacacatacacactcatacgtgtgtgtgtgtgtatgtgtgtgtgtgtatgtgtaatgatttgtgtccatttcaagtgttttcacaccagtcacacattatagaaattactggagccatgtctacaaaagcaaagtgaagtgatgagctgaaaagtgatcagggaatctgatcccataaagaaagtgagtctgaattgttgaaactaaagcacttcttttccaaaaatacttctgcaactcatgaacaaaatgaagttaacttagtgtttagcattaaaaataaaagttgtaccttgaccctagaattccttttataagatttaattgtaattgtctcaaagcatcaaataatacatctttatcattaaacatgaatttaatgtctaggataatttttaaaagaggaaattaaataattttacatgtctcatattttcagtgctttctcaaaatttgatggtgaatattacattgcattcaaaatcttcactgaatatcatatatatctaaatgaaaagagaattacttatattcatctattttctcagaatctattcagtaccctatggagtacatggaagaagtatatttttggaaccagtaagtatgggagtccacgattctcaggtattgattgaaaaaagagaaaggggcaagaaattcattaaagaaaaaccacagatactgaaacatttgacacataaaagtaattaattgctggagactacaattcctggcaaacaccattattccagatgcaccatgctacccagcatgctacctgaatggcggtttttatccatcctgtcaccctgagcatctgtctcaacctgctgaggcacagacttccaccatgtgcatcaggaaacacctcactcatactgtcatataatgcaacagggaggcatagtctctctacaggtctctctctttacgttgtaccattctgttgggcaacaattgtcccaacaaccacacttaaatccagtggggaaaaaaaggttaacagtaaaaatttcttccacgtaattcaatttctcacaatagacagaaacagggggaaaatgtttgccctgttcaaagtactaaaactagataacttaaataatttaagccaataaataatattatattgtatttaacccattattcctcacctaccctcaaagtaggtatacaaaagactagtttgttattaatccacaaatatgctaaatgttagcaagatgatttttaagtacaaaaaagtttaagattgcaaggaaggaaacaatggtcacaaggtctttacttatgcacatttgtgcataaatttccacccaatttccaagacagttgtatcacaaagctgtgaaatgtgcaagagtatactttgtacccatcatgtgctctgttttgacataatgagtaatgcagacatttacatgttcttccagcttcaatcagtagacctgattttcaaaatctgccctcagatgaaaataaaataaacgaaacatttagacaatggctatattaatctgggaaggcaacacctgtggataaaacattagaagaaaacatatattttattttcatacttttgatatgattgtaacatatttcttgagtaatttaaatgctttgttttcccacacatattcaaatcagcaagcttgtagctggactgcaatatcaacaacaagttgtttcaaacagcatcaaaatacaacttcattgctacacttacaagtaatgaattttatgtgactatgaaacgaatataagcttaaaataagtgaatctaataaaatggctattcctctttttacttggaaataataaattaacattatattttaaacataaattatgatttctttttctgttttagccttcatgtaaatttacactggtatgatgtgtaatttattgtacgtttgctacttcatagacagatgcatataatggttctagaacatatatttttgtctgtcaaattattatataaaattatgcttaaaataagtatatttgcaactgtgtaaatgctttaagtgtaatggcaatgtattaaattgtgctggtcaatttagggtatcattgtctaaatttggcttttgggggccctctcttaaactaagtatatatggtgcttcaagacaattatgcaatgaaatcaaaataaaccatctcattactggaggataggcaaatgccaagtggaaatgctgcacctcacgtaagtcttggggcaatatatatcatagctcaaaaacaaatgtaaattgtttttcttggaaaagacattctaccattgtacacaggtcttttgtaaatcaaagaaatcaatagaataatatccattaagagtctcatgcttactgactgagtcagccaggtgattccaattatattcgttccaatcacataaagaagatctgcatttttcaaaccaaacagctgaccagcagttgttgtatgaagtcaatctctaagtgacaagtggctgtcattgtgctccaactatgtgctctgtatctctcatcttactctctcaagatgtctttagacatgtagttatatacattctcagaagaactttggcctttcataccttaattataataagcattagtgcctttggatgtatatagggcagaagggcctataatgagtgtagggacgaatgaaggaaagaataagtaggtatgccagggcaacatcacatcgagttgtcgtcttgtggacacacttctggagattatacatttttgctttatcacaaatctatagtgtggggtgaattattaagagccagaaaagagactgtatcagaatataatattagggcccgtggacgttatcttcattttaaccattgtatctagagagcttaaatttgatcattaacattctcctagaacagacattcttgagagagatccagaaagctatgggataatgataattatggtttctccaatttttatactgtcacctcaagaaaagttacaaaacagtaaaaacagtcattgtatcttatttaaattctctaaagtcagagaatatgtggtgattctgcctttatttttggttggaaaactatagttatctatttaaaagagatattgcattatgtattttgaagccaaactgctgtgttgatttatcagtttgtcatatagaggcagttaaaagcataaaccaggtaagactaaaagtccagtgatagaatttagagcagtaggtattactgaaagaagtaattgaaaacagcttctgatagtgcagtgccacacgtggagctgaagagaatacagtagaaggatggggccaggaatcacgctcttttgggttctgaaaatggacggagctgggagaattattgaaactctctggatctcttttatttttgtaagtcttctttttttttttttttttttattatactctaagttttagggtacatgtgcacattgtgcaggttagttacatatgtatacatgtgccatgctggtgcgctgcacccactaatgtgtcatctagcattaggtatattatttagataacctttaagatcttttatatctctagatttttcattacgcccttattaggaaactttttcggagaattgtagcgtaacttgttggacagtagttgagagtgggactatagaacaagacacacatggctttgaaaagcagctcagcatcagattgagggccacaagagttgcatggtcttagccaagtcacttaacctctgtaggcctcagtttcccagatgtagatggtatttacttgctattagtacattatatgatgcatacaagctttcctgaaactgtctttccaactgggaaaactgtgacaaaatttatctagcttttgggaaatcattttgactttgaatcttgtattcaactagttatcagcatggattctatgataaggatgaagaaaaagggatatgttttaaaatatattgacctataggtcatatttggtttatttggctcttcaatgacctcattcaacacaaattttatgctgtgctgcatgcacccaagttgtgctccatacattaccattggtttaactagacgtggctaagtccatggtacagtttacctcagcatttatattggaatttttgggcaataccacttatcaagagtactttgtgcccagagtaaacaacagaaagagaaaggccatggcagttttgcgggcttgggaaagtctgaaaaatttctttagcttagttgccatgtgtttttctgatcatttccttagaagataccacatgattgaaataatttttaaagaagtaataacaacgataggatattcaaaattattttttcaatgtgtaaatcatccaaagttggccttcaaagttcataaatgtgtatgttgagggtgaattgggggtgggaaatacatgctaatgggttccaataaaaattaacatgaaatttgaaaacatcaaggtcgagaaagtattgcaaaccacactactctatgtaggttaaaatgtcccaggcatagatgatagccatgggcacaaaacgtaagctaggacttaagtgcaaggaacaatttgggttgaacccatgcagagcaattgctgtctcaaacccatttgtttgtgttcacagcgtttgaacttacacaatgaacgccacatgttctggtttctgttcatcaacattaagtccaaatttatcctgaagaaaaaaactaacctacatagtgttctattttataataacttcctttttacattttcatttgtatagcaaaatttccattaaataataacatacatagtaaatatttcccacatttcattttccagagagaactacaaagtcccagaaaaataaatttttaaaactgaagattttaaaacataatataaaataaaaagagctgattatgactttgtacacatttggtgcagtctcctgtatcacagttatttagaggggctaaaaaaaaatccttaaaagtaattttagttcactccatatcctaattaataaaagactttttaaacaaaatctgaagtagaagcaagttttcagcattcatattggtggcctgttagagtctactttggagattcttctttcttattttcatcatctgctgaccctaggtgttaggagatgttgccttcagtcctggctttcctcctaactgtttggtcttggatgacttaattgacctttcatcatctcaaatcatgttctataaatgatataaatttctataaaggctctttaaggcctctttctgtcttgaaatttaatcctatgttggtctacacctcccctccatgtcagatcagatgtaatttattacttacactaacgctattcgaattaccccaagatctcatgtcctatcctctccctcattgccactgccagctggttagtgatatcaacttctctagtgaattatccattttctctttctaggaaataggggggacacaatatttttatcaaggaaaataacacacatttgccccctccaagtcctattttcttaccatcagaaatgctctatttgtgaattcagcccatcttgtggtattaacaacatacgatcgagtctcactataaatatacccttcactttgtccaggtagttggtaaaagcctaaggtattgaacaactccgagttacccagcaggcagccccttggaatcactggactattctagtagcctctgaaattctgcctcctactctatgttgagccttctaagacccataaaccgccccccaaaactggttattttttatatgagtttcatccacttatttgtgtattattcaacaaatgtttattgaacaccatctactcaggaggcttggacagaagaactgtgtgagcccagcgagctatgatcatgccactgcactctagcctgggcaacaaagacccaagaaaaccctccaaaaaacaaaatggacttgagagattaatgaaagttgattctccagtagattcagaaggttgatttcagggatttaaacctattatattgtgagcccactcacaggcatgagagagctggggggagctgacttggggagaagttattaatttgcttttttatatactcaattgagctttttacacagtttccaggagggggaatatagtatgcattagaaaatgtatttcacatgcttggagctattctagattaagtttttattcaggaatgagtctttaatctagatcattggttctcagtcctggatatacactagaaacaactgagaagcttttgaaaagtattgggtccctcttagaccaattgactcggaatctctggaattagggactagcatcggtatttttcaaaaagtttctcaaattattctaatatgtagccaaggttaagaaaaattgatttagagtctgtatctctgggatataaagaactcataatcactaatctgatgcctagacaggaaatgaaagcatagcttcccctttctttacttgtctgagagatgacttctgagcattacagatttcatctaacaagaagaataaacattgaacaatgaagcctaagggttaaaaatgttgtgaaagggagtgtatggggcatgtatgagtgcctaaaaaggggaacaaatctaatctgtgcatttgggcaagtacatcctcagttgtttaatacgtgaaatgatgaagtgccattcatctaataagtaaacattaaatctctgctcagattgtttccaaataccattttccattaaagaatatcaggactccctatagggaatggctgattccagtctgtggcaaggaatgttaagaggagcctggaatatatttgcataatagatagcaaagaaactaccaatgatcactgagatcacgtaaaaaggcaactgagccagagagtgggccatttgccctatgagagtctctctcatcctcctacccctgcccttttccctaagcaaccagggaagtgcaactgtatctacccatgggccacactcacagggcagccaggggaaatctttcctcccccacctagcagcaccaggtgtagaacacacacttgagacacacaggtggcacttacagtgatgaagcagaagacccagctgcaccaattaagtatagccagacagaacagtgctgcaacaactaaaaactgaattgccattggatccacagctcatagaagtaggccagggcctaaactctaaacccaaaccaggtgactacctgctaaaatataaaataaaaataaaacccagagactgcaaacatactattcaagttatccagaatatcatttaaaaaaaatcagtcataccaaaagccaggaaaatcacaacttgaacgagaaaaggtaaatcaacaaaggccaataggctgatgagtaagatgtagaaattatatgacaagggttttaaagcagtcatcctaaaatggctcccacaagcaaacccaaatgttctggaaacaaatgaaaagcatgagaacatgaaatgcctgcaaagaaataaaaggtactaaaacgaccaaatgggcaacatagaactaaaattaaaataatcaaaacaaaaactcactggttgagctcaatagcagaatgaatatgacagaaaaaagaatcagcaaacttgaagataaaacaatagaaattactgaaactgcataacagagaaaaatggacagaaaaaggattaaacagagtatcagagacacatttgatgataacaacagatctggcacttatatcactggagcatagatggagagaagaaaaagagtgagttgcaaatgtattcacataaatattacgttggtgcaaaagttattgcagtttttcacattacttttagcctaataataactgaaattttcctaaacgtgacaaaagatataaacctaaagtttcaaaagttgaacaaattcccaacaggataaactattcactacctacatgggaactccaatccaaatagcagttgatttctcacctggaggcatggaggccagaagaaaatgacactacatgtttcaagtgctagaaaaaaaaatcaggtgtcaaccttgacccatatacctggagaatattctttactaatgatgaggaaataaaaacattctcaaatgaagtgttcttcatttgattgtttaaagcaaaaattgtaagtcatccaataaagtgcccaccatgtgtagagggaatagtttaagaaaactacatatttaatacgtggagggtaaggggttctaaatagaggtaagttttctacctatttcactctatgtcataaaatgtcaacacctgcgtactgatgaaatccatatgtatattgtttgttgttttgctttttgggtttttttttttttttgagacaaggtctcactcaagttgcccatgctggggtgcagtggtttcattactcttcattgtagcctcaacctccagggctcaagcgattctcctacctcagcctcctgagtatctgtgaccacaggtctgtgccaccatgcctggataacttttttttttttttttgtagagacaaatctcgctgtgttgcccagtctggtctcaaactcctgggctcaagccatcctcctgccttggcctcccaaagctctggaatcacactcatgaggtatatgtatattataacacctagaacaccacttagaaaactgtacaaattgatgtactcaagaacaccataagcaagtcaaaaaataactctaaaaatgttcaagtgacccacaagtgaacacaggcactgaaatagttaaagcagtcttgacgaagaataccctggagggaaatgctggtgagaaacttgtgatgaatctgttctgtatcttgactgttactggtggttatagaaatttatatatgtgatctaattgcatagaactctggggaaccagcttccctggagaaagttcttataagagacctagtgttctaagatgccacatagcatgataattagctctgtaaccatgtttccagttatttgatctgatctgaaagtataataaagcttatctcattcccctgagactgtcaaatgaccacagcccagcaagggctctaatgtacactcaagcgtgtcagggagactggagtgttaccttcctacacacttatattttgggagatataaagttccagaaatctgaggcacctctaggtcagaaaagccaaggcacaccagtatatctgaattttagagagattttatttaaatactaaagggttgaaattaggacctatacccattacgtttccaaggagactcaagagttgaggagcacagcttcctccttctcctctataaacaaagcaagatctttttttttttctcatccatcatccatggagcatccagcacacaggaacactgtgttccagaaaccacctccatgcctttcttcaagtgaaacagccattcactgccactgatacagctgcttattgcaataattgtgtctcctgccttctgatagttgagcatctccacctggactctactgttttggtgtcctatcaaccttactgcttactagtgggctcttgctaccatcctccttgtcaaacaaagaaaatcatcactaaatttcttaatggtgctggtaactctctcaccagcacactctttatagttgtgatcctctgaaccttccgtgaaacaccatatagtgctcttccagcacgatttggcatgtccactccagcaagccctctactctgagtgttttggccccttccttcattgtctgacatgacaattctggtgtcttcaacttcattgagctgggccaaaacattttcatgtttctaggagctgtcctagcagtgagtatacatcatcttcaggagtctttgccaaggtgtaacaccctgtatcccaggagagtgcttccatcactggagaggctgctgccacactgcaccataaggatggagtggacaagatcccagccagtccatcatcagcctcttcagtgctgacatggtgtcgggctactaatttttcaaaattttccactcttcttcccaagagtttcatcagacgaatagccacactgccacttggacactttgagctcccattatccaagtcatcccaggcaggaagaggaatcaccatcctaactggggtttctgaccctggtcatcagaaggaggtgggtttgctgttactcagtgggaacagagataaatacatttggaaccaaagtgattcctttaatgtctttggtactcgcttgcttacttgtgaaaacacatgggcagatgcaacacaccagcctgaaaaggatgtggcagtctccttagaccccctcagggatgagagtctgggtacctcacaaagttttccaccaaagccagcagagttgctagctgaggatgaagcgaatttataatggacagcagagaaggaaaacaatgagtattagttttgaccctgatacttggttcagtgatggggactttcctcttctaagtctacccccaggaagaggtccactgggaccctgaaggaggtcacttaaagctatgaccatttagactcctaagtaattcttgcctagtccctctttccaagtgtcctccagttcacattggagcataccagtcaaggatacacaccaccttgagtcagcttactcaaatattaaacagttcctactattcaacatagttcctgcatattgactttattgaataaaatctgcatttcccataaactttaaataaaaattttatttacatacaaagtgcaaattnnnnnnnnnnnnnnnnnnnnnnnnnnnnnnnnnnnnnnnnnnnnnnnnnnnnnnnnnnnnnnnnnnnnnnnnnnnnnnnnnnnnnnnnnnnnnnnnnnnntttactttcccttcaacatgttcaaatgtcacaatgaagttgaaggaagaaaaaggaccagactagtactgctctggatttattttatttaaaatgattgtcatgatctctttagtcataggtcacccgatttattccctcaagaaggtgtttgccaaatacatcagcacagatgagttttaaagaaacttgtatctggagacagtataataaatatttataagactgagacatttgactgacattgagttcagccttttgccctctctgtttactggtatttattgttcttttctaatgctgtacttggttgagctaaaccaggaaacaataaacaatttattttagcactgagcaaatttcatttccatggccttctacaggtttgcttgtcttgttgcaaccttgtgtggaagaatatatttccagttatcaagtcaggttgtgattactttctcaaggaaaaagtgcagtcataatgtcatgtaatttgaaaacatgagctttgggagcattttactggcttatgttttcctgcttcttaaaaagtataaattaaaatacttgcaactcagttataaaaatgtacttttgtatatatgtttaattgtgatgaattgaacaatatttgatcatgacacttaatatcaaatgtaaatatcattaatctctgagggtgctaaagagtgtgcccttctctgcaagcatgatgcttcccacaaacatgaaaggtcttatgaaattattattccttttccttcttttaatggtctgtgcatctatttcatcccaagaactactgtgattgaggatgacaggtcttaggcagattcacaaaaaatccttttgtgtctgccctgacagtgaacatttcctctgaattaaccattgcccagggcacttcatgttgaagaacctaatcaatttgcagcaggtgttaatgcctactataatatttcattagataggattggagagtgaagttagattagtctagttgaaaaataagtctaggaaaaaataaagaaaattcaaggatgcatttcctttcagctctgagaatcatttttcagttctttaagttggaatatgacaaataaatcctaaatattagccaaaaaagtgaagttttccctccaaaagtatcaaagtagatggtaaatacgtttttttgtattgtaatttatttgttagctgaaatcttccacaaatggcattccacaggtgtcaagtgtatactctaacaggtatattgctgtcacaggtactttgctccaacatagattttatgaatataatttaacctgaaacataaacatcgctctgtgatcatttactttctattgcacttctaatctaagtccaattttgcttggatccgtctttgccttggatttgggagaagacaacacacctataccgcattagcaaactgcagaataagaagccaagtctcccagcattcaaagaacattgatgggtcaccaaacactggtgccactaacactgagaatacgtggtgtgtcttattttccaaggaaacgctaacttgccaagtgattgacatctttctttggggaagtagaatttgtttggttaatatttatctgttcaaaggagttcattttttaaacagttaaacttgtcactgaatatctgaattaacacttctcattgtgtttgtttttctgttattaggctgaaccttaatgccttagggccctccctctagcccaccctctgtttaccctactgttatgttaatgttgatgaagaggccatctcatcttattgattctgttctccctggcttcctccacgtcaggatatagcacagatgggagtcctcaactcattagagacagccactttaacactgaccccatcaatctcctctacacattagagacacctaaagattttctccctcagagactttgacttcacggttttgctattgtgtgtgcacccaggtgagaagtgtctaagctagctaggaagaaccggggaaggggatttgttattgtgggatgaataggaaagcttgggggcacgtcactgagaatccaaaagtagattagatttataacctgcctgcagttatttaaacacatacacacagagctcatacagattgatcttcttgtgaatgcaacaaggttagtggtttgtcttctgaaaaaaggagccaagattgacggaaagcccattacttccaaatttaatcacctcaaggcaattaaagcaattttgtgttttctactttagtgctcccctgaaacgacagcatctggacaactttaattaccgtttcaattcagtaaaatgcatgaaaaaggcaagtttgggactagccatggctcttttccctactgtttttctgatttctcagctgcagtgttccggtttattttctgtcaattgtaggcgaagtgtctacacccttgaggctgcttgtgctcccgaaaagtgtagggataaaaactctaaaggaagatcacccatgagaaagctgaaatgatgggtatttaaatgtttaatgtacgcagagttgattatctctgcaggttgcctccctgatataaatattgacagcatcacttgagctagctccttcaggccctccttatagtctgtctcaggactgtttgaaaagtagtgcctggtgggcaactaaacctcagaagagactacctggcattagacagtaagagactaggtcactggaatgcccatcatggactgggggctgccatccaaccaatgctaaagttgggtgagcatagcagcaatttatcatatattggaaacagtatattatggctcatgtccagacaagtccagggggcacaaggaagtgacagaaataggtagcttagctctccacacacagcctctgttgtactgacacttttccctcagctctcacctgtgggagatcccatatagccaactaatagaggatttaaaatgtcatgcttagttcacaaataaatgtcttaatgtgagcaaaaaacagattgctgccacattacatccctactagagtagctttgagagtcctggatggggtccatacttccaatgggcagaacttggagcactaaacctggtgatcaatttgatgtggagagaggtcagtccctacgtaaggacttacagactcccagggaatggcaaatggtttgacttgctgttcagggaactgcaagggggcagtaaacaactgtatttgcttttctacaaaggacgcacccaggccaaactatgacatatgaaatttaataaagagttttgaatattttctaggtaaaattgagaagtgttaatatcttagattgcttaataagcttataacactcatattctgacattttttcttcccaatcccccctttccacactgtcatttttcctctcttttagactttcccgccattcatatctcccacaagtactctttagcttctaaatgttactctcgccttccaattactaacgtatttcctttaattctttttttttcgatggagtctctcttagtcacccaggctggagtgcagtggtgtgatctcagctcacttcaacctctgcctcccaggttcaagtgattctggtgcctcagcttccagagtagctggtattacaggtgtgcaccaccctgcccgtctaatttttgtatctttagtagaggtgggattttgccatgttgaccagtctagtctcgaactcctggcctcaagtgatccaactgcctcgggctcccaaagtgctgggattgcaggtgtgagccactgtgctcagccttcttatttttttttatttttttattttttagacagagtttcactcttgtcacccaggctgaagtgcaatggcatgatcttggctcactgcaacctccgcctcctgggttcaagcaattctcctgtcccagcctcccaagtagctgggattacaggtgcccaccaccacgcccggctagtttttgtatttttagtagagaccaggtttcaccctgttgaccaggctggtcttgaactcctgacctcagatgatctgaccatcttggcctcccaaagtgctgggattataggcttgagccaccacacccagcccttcctttaaatttttaatggaaaacaatctatacaaaaatagagggaatattataatgaatcctatgtacatgaaattgcacctctcagcttcaaatgttgttatttatgatgagtcttgtttaatttataaacctattcacttcccagctcatgccagcatcttctgatcaaatccacatatcattttatttataaggatttcagtgtttctctaaagaattattttaaaaagataactacactacaattgtcataccccaataataataacaaagacaataactcctcattaccatcaaatattcattactcagtattcaaagtgccctgagtgtcttataaatatgtaaattttatcttaataaagatctaaatacagtccatatattgcaattaattaatgtgataaagtttttgctctttgagaaagcttatattttggtctaatgtttccatttatattaatacccttgttgaaactattgttctcttttcttgtggctacagcctatgggttccacactaagatcaatactgatattaactagtgaccccttcattttcctctcttttctctcctcttctccactcttcttccctaaactcttctaaagccctctatgccacgatcttccttcttggcaatgccctgtcattagggccttactcagcttttatccagtcctgttaaaatgtgcaggttctatatcctgcttcttttggtccttttcattttaatttaatttctatttttttgtgacagggtttcactctgtcacgcagcctggagtgcagtggcacaatcacggctcactgcagccttgaaccccgggctcaagggatcctcctgccttggcctcccgagtagtgggaaacacagacacgagccaacaggcctggctattttttttttttttttattatttgtagagatagggtctcactgtgttgcccaggctagtctcgacctcctaggttccagtaattctcctgcctcagcctctcaaagtgctgagattatagatgtgagccactgagcctggcctggtcctttattctaatttcaaagctaatacccagttaatccctcagaagacacaattatggctccataaacagtgtttaaacataacatcttaagctggtacttctcaaactggagtatgaccaattattgcaggctaatggagtcataggataaataagtttcattttcatgaagtgttaaatttactttgtgatgagcaatattaaaaaatgatatatattttaatatatttattgtttcatatttatgactaggttatagtgtatcatcttcaatttatactaaattttaaagttagttatgaaacggaaaagaaattgtatgctgttagtagacatagttgcattcttttgtgccattagttgtgcttttattgagaactttgtcttaaacccaaagggtgactctaactatgagaatttctttcttggtagtttgctagtagaaagaacttcgggtgttcagagctttctgatgaccttcaaatcacaggtgatacatactctgtttatttcatgtgtgcttaaactcgaaagaagtgttgaccacatccaacacggttgacaaacatgtattcatgtggctatcaattcaaacctttccacttctaacaatttagctaaagaacgcaaactattggaaaatatttcccttgtggccactttatagctttatgtatacatcaaaattgcatttagttgttaaaattaatgagattttagctggataaggcatgttattctttgctctctgacatttaaggaacttagtttagattcaggaagtactttgacttccttcgaagccacatcccaagtcagtagcctgccacgctggtttctagtcagatatgtctacatattatttatttttatatctttatgcctcttctagtctctctgtcttgaattcctatacattcttgggcatgtagaaaaactcaagtagtctggagtccaaagtcactttctctatgtagaattccttagtataccctaaaaggaattgattgccacctgcctatcccacacttcctttagaagttgttcatactgctgggcatgctactgtatgtgctctggagttaggcctggattcccatctctgtgtgatcacttgctagatgtttaatattgagccagttacacagtctttctagatctctgtttcctcatttgtgaaatggggaagataaagctgcttaccttatagtattgttgtatataagataatgtatagagactgcctattctagttctggacatataatatgtacacggcattagtgctgttgttgttgtaattattattattacagtgggatgtagtattcctttagcacccattgcttattcaatttatcataatcattatccaacacatagtcctgcacatttttggttagttgccattcagtaggtttttgccaaataaattatttaacaaataactccattgccagtcgtcactgttctgttcaacttagttcatcatgctactaaaataattttcttaggagatcataccttttgcaacaacatggttacacctgaaagacattctgctaagtaaaataagccagacacaaaaagaaaaatactgaatcatctcacttatatgtggaatataatttttttttaaaagtttgaatacacagaaatagaattaaaatggtggttaccgggaaccaacagtgggtgacagagcaggagcatcgacatcttggacaagcccatcattctaaagtttaccttaataaaaaaacacttaaatccaaagggcatcaacctaatggctaaggtcagcacgaccataaaccacaaataacatctttaactagaaacattccaaactcctccccgaccagagacatactagccctgagataaccccactctgggcaggaaagatgtctgccccaaaataacttccccacctcacagaaagattccagccccaccataaacttctccacacacataaacattccaagcttgtgataagtcccctcaccctgaaaccaatatatattcttagtctgtaagagaaagcactcctgaccgaaattggccagaggcacctctcacgttttatctaaagaaaacctgtctttaactgtcagctgtgttttgtgtttcttttctctttctttaactcttacagtggggagggtggggagggaaagatataggtcaaaagggaataaagttgcacttgtgagaactacagttaataagattatatcctatgctggatatttgctaagagagtagattttaggtgctcttactacaaaaaggtaactacgtgagatgatggatatgttaatttgcttagtgtagtaaacatttcactatgtatatgtatataaaatcattgtgctgtacactttaaatacatgcaataaaaaattgttagcaactcttggtgatgacactcatttgagtttcaaacataaatactatttctttatatacagtgtacctgtattttttctagaaagtaagcctctttgattttccttctgtttgttcatgaaggatcttcatgaagactatactaatattttagaattgctatagaacatgaaagtaattactcatgttgatttttgtaaatagttgaaaagacttaaatgagaaacaaaactcacaagtgattataatttcacttagaaagtgaacagtgagaatatatccactcagcagttaatagagagaacgagagttttatataactatttaaatgaatgggaaataaaatatctttttttaaagagagttatggggaaaacacagaccatgaccccagcttctgcagcaccactgtgggtgattctctggagaagcactggaagccaagggatgccactgccagtgctatgtgctgtcttccttctcttctgctttcctaatgcagcatgtgtagttcttattggcaaattgtaagggccaaggagttctggaaaatgaatttccagttttcaatcttgaaatgaagaagctaacttgcatcagacagtccacattccacgtgttttctagagtgaaaaggatggcctggaaagccaacatatctgagggtcatgaattactgctgtggaagactataattcaacatatttgtgagggaaatgtgttaaaataatgggcatacttaataatgaaaatatatgtctatcagtcctttacaagctagacagggatttaagagagggctaaacatgatgaacattgccatgtaggccatttttctgtcgctgaactagcctcttctttacttcagctcccagagtgccagggcatgctcagtgcttggagaatagctgggaggcacattcatcacattatgatgttactgacttaaaatgctgcccattcccagcagttttccatatctgtatgggggaaagaaaaaagtggctatgcttatcccaaatgtgtactagtttgagagtagaggataagtaaacatatcaatttctgtcaatttttttctactatttctggaatgcatttccttttcattgctgccaatactgcatttctaatctagacaatcatcggcttggactgctgctgaaaacctctatgtgcacatctgctttgcacctgcacacctgctctagcgagttttacaatgtgaaaacttatcacttaacttacatgattaaaataaccttttaatttattctcatttaaaaaataaaatgaagttcattttttagaatataaaataaacacaagctataaataaatcatatgcaaacttataaagaagaaaatacaaattccattataaaaagtcaaatgctaaaactgttctgtatatatttttagtttttttatgtgtacacaaacatacccacagtatattaacacagggtattaaacaaataccaaggggaacagttaacttgaatgaaaggtcaaaatcagcaacaagttctacaatccagtgctgatatcagatacaagcttcaaggataagtttctttttgtaggtttattccagttttgtgaggctagcatgaggtgtattcatttgccaggggcaaatttatacttctgaattaacccgtgcagcaaatgctagcatctgcttgcagtctatttagaagcatttgcagtagactctgaagggggctgactcgtggtactcctattgctaatccacatctactggaagatgggacagtgaggccggaatggaacagcatatccacactgagtacttgtgctctgggggcacgctgatctgatcttcatggtgctggcaccacggcggtgatctccttctgcatcctgtcagtgatgccccaggtacatggtggtgccactggacagcaccgtgttggccaacacgtctttgcgaatatgcacatcatacttcatgctggagttgatggtggtctcgtggataccgcaagattccatgcccaggaaggaaggctggaacagcatctccagacacctgatcccctcgttgctgatcacaaccatttaaaattgtacaatttattggcatttagcacagtgacaatgttgtatatctatgacttacataagttctaaaatattttcattacctcagaaaaaaaaaacaccccaaacacattatacaattgactcccattctcccttactcccatcccctggcaagcaccaatctcctttctgtctctatgaacttacttattcaggatatttcacattaatggaaaaatataaaatgcaatcttttgtgtctgggttctttcacttagcataatttttttttttttttttttttttgagatggagtcttgctctgtcgcccaggctggagtgcagtggcgcaatctcagttcactgcaagctccgagttcaagctcccgggttcacgccattctcccacctcagcctctcgaggagctgggactacaggcgcccaccatcacgcccagctaatttttttttttttttttttttttttttatttttagtagggatggggtttcaccgtgttagccaggatggtctcgatctcctgacctcatgatctgcccgcctcggcctcccaaagtgctgggattacaggcgtgagccacgcgtcccgcctgcataatgtttctaaggttcattcaggttgtagcatgtattggtattttattcatttttatagctgataatattccattgtatgtattactacatattgtttattcatctgtctgctgatgtacatttgggttgtttctgcccactggctcttatgaatattgctgatatgaacgttcttacagaagaattttagtatctgttttcaattatttggggtatacacttagaagtggaattgctgggtcatagggcaagtctatgtttaactttttgagaaaccagcaagctgttttgcatagcggctgaaacattttacattcccaccagcaatatatgagagtttcaatttccccatatctacatgaacatttgtcatctttccccctatttttattatagccatcccagtgagtataaagcatatctcactgtgggtttaaattttattttcctaatgattaattatgttcaatatcttttcaagtgcctgatagctatttacacatcgctttagagaaatgtctattcaaatacatggctgattttttgttgttgtaagaattcttcatatgttctatatactaaacccttatcaaatagatgatttgaaaatattttctctcattttgcagagtgtatttcactttcttgataatttcctttgatgaacaaaaatatttaatgttgataaagttcaatttttcttttttttggctcttgtctttggggtcatgaaaaatccatggacagtcaagggtcttgaagatctatttatactttcttctaagagttttgtagttttagctcttgcatttggggcattgatccatttttagttcatttatatatacagtataagttaagggtacaaattgatcccattgcatgtggctctcaagttgtcccagcaccatttgttgaagactttgatgttcccattgaatggtctcggcatccttgtctaaaatcatttggtcatagatgggttataggtttgtttttggactctcaattatatttcctttgtctatatatcttcctaccagtaacaaagcaattgccattgctttatggtacattttaaaattaggaagtgtaaattttgtcttagttctttttcaagattattttgtctctttgggtatctttgccattctctagaaatttgcagatgggctttttgtttctacaaatgttgttggaattttggttaaatctttagatcacctagggtagttttgtgatcttaccacataaagtcttctaaaacatgaccatcatataacttactattatttaggtcttgtttgatttatttcagcaatattttggagttttaagtatacaagttatttaccttcttggttaatttattcctaagtatttttattcttttggatgctattgtaaatacaattattttcataatttcctttttagattattgtttcctagtgtgtagaaagacaactgatttttgtattttgatcttgtgttctgtaacatgaattaatttattagttctaatagtttctttgtgattataaagggttttgtagctataagctcatgacatgtgcaaatagagacaatcttacttttccctttccaattagggtgtcttttagttgtttttcttcatgactcagttgaaaacaagcatttttgtcttgttattgatcttaggggaaagactttcaggccatcacccttgagtatgatgttagctgtggatttttcataaatttcatttaccaggcaggggaagttcttttctattcctagattgttaagtgtatttaccataaaagattgtttgcattttgccaaattttttttgcttcaattgaaattataatgcattttttcttcattttgtttatgtggtgtattacatcgattattttcatgggttggaccactcttttatttataggatgaatcatactaggtcaagatgttagtgcttttcatatgctaacggatttgcttttctattttgttgaggatttttacatctatatttacaaaggatattggactacagttgccttttcctgtagtggatctttatctgactttggtgtcaagataatactgacctccaagaataggttagaaagtgttatttccttttctattctttaggaagaatttgagagtaaccctttttaattcttcttaaaatgattgatagaagtcaccagggaagccatctggttccagcttttcttttttgggaggtttttaccgattcaatttctttaatggttataagtctatttaggttgtacatttcttcttgagtctatttttgtagcttgtgtgtttatagaaatttgcccatttcatttaagttatataatgtgttggtatataattatttatactattttcttataatctttcttatttatatatatttgtaatgttggtagtaatatcttttctttcatttctgatcttgttaatgttaattttttctttttttcatagtcaatctaggtaaagacctgtcaattttattgatctttttaaaaaaacaacctttaaaaatatattttgttcattatttatttcatttatctctgatatagtttttattgttttctttctgctggctttgggtttagttttcttatcctagttccttaaggtgtaaagttaggttgtcaatttcagaccttccttctttttgaatgtaggtatttacaactgtaaacttccctctgagctctgcttctgatgcaccctgtaagttttggtatattatgtgtttattttcatgcatctgagtgttttctcgtttcactctgtggatttcttctttgactcattggttaagagagtgttgttaaatttccacatatgtgtacatttttctattttccttctgttattggtttcaattttcatttcattgttgctgagaaatatgctttggatgatttcaaatgttttaatgtgctgagacttgttttttggtctaacttatggtctaagctggagaatgttccatgtgtcccacaatttttagaaaagacatatcttactatggcctacaaaagtcaaataacttgacccctaactatcctagctttatcttgcagctggctcccttcactcgctatgttttgccatgctttcttttagacatttgttttgcccaacttcttctcacgataagcttctattggcttcttcttcctgttgtgttattttggtgtttttttcccttctagctaaaattataccttcgtatagaaccacattcttctcttccacagagtatctcacttaagacttcatacacaattcaatgatcctttttctccaccactcaactttaaactatgacagcaggaatcaagtctattttgctaattactttgtctccagaagctaggatactgcttagcacctcatatgttctcaatgggtacatgtggaataaacaaataaatgaagaaaaagggtaagattcttgagtcttcaaattatactagctattccaattttacttaagtctgggcattaaaccagaataatcttcaacaaaaaaagaaaaataaatgagtaaattagcagttactattcaactaattcttagaattaatataaaacacaaaatctgtttcatttggaatgaataatttttgacggcattgttcattgagctatatgatatattacatttattcttatggaaattttaaatgcctgtaatgtactaagcattagacacagcttataaaacacaatatgtggtacattaagtgctcagtttgttttttacctctcctatcagagcatttatggactattatcagaactcataaaaaagggatactgttatgcacttccttacaactgaaaatgtcaggggaggtagagcaacgtagcagaataaaaggatgcactgattgtcctacctgcaaggacaccaatttaacaactatctacacagaaaaacaacaccttcataagaacaaaacatcaagtgaacactcatagtaccctgttttaactctgtatcactgaaagaggcactgaagatatggaaaaaacagtcccgaatcatcaatgccaccccttccccactccacaacagtgacagcatggtgcagagagcatctctgggcactgggagaggaagagaacagcatttgtgaggcactgaactcagtgctgtcttctttcaacagaaaagaaaaccaaaccaaactcagctgatgtccgcccatagagggaacaattaaaccagctttagccagagagggtattgcccatcccaatggtccaaatttgagttcctgcaaatctcaccaccaagggccaaagtactctgggtttctaagtaaacttgaaaggcagtctagaccacaaggattgcaactattaggcaactcctaatgctgacctgggcccagaaacagtggacttgtgggagcaggggacacatgacctactgagacacaaggtggggcagctaagggattgctggcattacgcctcttctaactgcaggatacacaactcacagctccaaaaaagaccccttccttctgcctgagaagaggagaggaaagagtggggaagactttgtcttgcatcttggatacctgctcagccacagcaggatagggcaccagtcagagttgtgagacccttgttctaggccccagctcccagacaacatttctagacacatcatgagtcagaagagatcctgctgccttgaagggaagaatccagtcctggcagcattcataacctgctaactgaagagccctagggccctgaacaaccagcagcaatacccaggtactacatctggggcctcggatgagcctctgagacttgcttgcttcaggtaccagcacagccacagggaggtagagcactaaatgggctctcgaggtccccaatttcaggacctgactcttggatggcatttctggatttgccccgggacagaggagagcccactgccctgaagggtgagtcctaggccaggcatcattcactacaagctgacttaagagcccttgggccttaagggaacattggcaggagtctggcagaactccttgtggtctgtggtgtcagtgtccaaagggtgaggctcctttgcttttggaaaggggaaggaagagtggaaaggactgcatcttgtggtttgagtgttagctcagcaacagtacaataaaacaacaggtagatttctaagatttttgactctagcccttgactcccagattgtacttctggacacacctggggcctgggggaatccactgccctgaagaaaaggacacaggcctggctgtttttgccacttgcaaagacccctagggccataagcaaacataggcaatagccagggagtgattacagcaggtcttgggcaagactcagtgctgtgctgacttcaggcctgacgcagtgcaattatagtggtggtagccacaggcatgcttgtgtcactctacccctagcttgaggtgtcccagaagacagagagagactctgtttgtttggaagaaagtaaggggggaagggcacaagagtatctatctagtaatccagataattctcccagatcttgttcaagactatcaaggtggtacctctatgagtctgcaagaaccacagcattactgggcttagggtgcttcctaaaacacattcagcttagattacaatacccttttgaatatctgaaaagtcttttaaaatacctgaaaagccttcccagcatcttataaaagcaagagcaagccaaacccaaaatcagtagaagaaaagaagtaataaatatcagagcagatataaacgtatttgaaatgaaggaaataatacaaaacatcaataaaacaaaaagttgttttttgacaaggtaaacaaaattggcaaatctttagacagactaactaatttaaaaagagagaataagcaaataaataaaaacagaaatgaaaaaggagatattaaaactgataccatagaaattcaaaggatcattagtggttaatttgagcaactatatgccaatacattgggaaatctagaagaaatggacgaattcctagacacatataacccagaagattgaaccaggaaaaaaatccaaaacctgaacaaaccaataacaagtaatgaaattgaagctgtaataaagtctcccagtaataaatcactggaacctgaatggctttgctgctgaatcttacccaacatttaaagaagaagtaataccaatcctactcaaactattccaaaaaatagaggagagggtacttccaaattcattctacaaggccaatattactctgaaactaaaaccagacaaacatcaataaaagaaagccagaggccaatatctttgatgaatattgatgcaaaaatcctcaacaaaatactagcaaacagaattcaataatatattaaaaagatcatccaacgtgaccaagtgggatttatccctgggatgcaaggatggttcaacatatgcaaattaatcaatgtgatatgtcatatcaataaaatgaaggacaaaatacatatggtcctttcaattgatgctgaaaaagtaactgacaaaatttaacattcttcatgatagaaatcctcaaaaatctggggatagaagaaacacatcttaatataagccatatatgacagacccagagctagtatcatactgaaggagaaaacacagaaagcctttcctctaaagtctgaaacaccacaaagttgctcagtgttattgctgttattcaacataggactgggaaatcctagatagagtgatcagataagagagagaagtaaagggcatccaaactggaatggaagaagtaaagttatccttgtttgcagatgatatgatattatatttggcaaaacctaaagacttcaccaaaaaactattagaaatgataaattcagtaaagatgaaggatataaaatcaacatttgaaaatcagtaacatttttatatgacaacagtgaacaatctaaaaagaaattaaaaagcaatcctatttacaatagccacaaaaaaattaaatacctaagaattaaccaaagaagtgaaaaatctcaataacaaaaactataatacatcaatgaaaaaaattgaagaggacaccaaaaagaggaaaaaatgttgtgttcattgattagaagagtcaatattgttaagatgtccacactacccaaagtgatctacagattcaatatagtccctatcaaaataccaataacattcttcacagaaatagaaaaaacaatcataaaatttatatggaaccacaaaagaccagggatagccaaagccatcctaaagaaacagaacaaagctagaggaatcacattacctgatttcaaattatactacagagctatactcaccaaaatatcatggtactggcataaaatcagacatatagaccaatggaacagaatatagaacccagaaacaaatccacatacttataatgaattcattttcaacaaatgtgtcaagaacgtacactggggaaaagacaatctcttcaataaatggctcagggaaaactggatatccatatgcagaagaatgaaactaaacccctatctctcatgatgtacaataatcaaatcaaattgattgaagacttaaatctaagatctcaacccatgaaattactaaaagaaaacgttggggaaaatctccaacacattggtctgggcaaaaatttcttgagtaataccccacaagtacaggcaaccaaagcaaaaatggacaaatgggatcacattaagttaaaaagcttctacagagcaaaggaaacaatcaacaatgtaaacagacaatccacagaatgggagaaagtatttgcaaactacttcaacaagggattcataacctgaatatataaggaattcaaacaactctatatttaaaaagctgataatcttatcaaaaaatgggcaaaggatttgactatacctttctcaaaagaagacatacacatggcaaacaggcatataaacacatattcaacatcattgatcatcagagaaatacaaatgaaaaccacaatggaatatcatgtcactccagttaaaatggcttatatacaaaagacagacaataataaatgctggtgaggatgtgaagaaaagggaaccctcattcactgctaatgcgaatgcaaattagtacaagtactatggagtacagtttggaggttcctcaaaaactaaaatagagctaccatattatccagtaattccactactgggtatatacccctgtatttgtccattttcatgctgttgataaagacacacctgagactgggaagaaaaaaaggtttaatttgagttacagctccacgtggccggggaggcctcagaatcatggcaggagatgaaaggcacttcttacatggtgcaggcaagagaaaatgagaagcaaaagtagaaacccctgataaacccatcagatctcatgagacttactcactatcataggaatagcactggaaagcccaggctccatgatgcaattacctccccctgggttcctcccacaatatgtgggaattctgagaaatacaattcaagttgagatttgggtggggacacagccaaatcatgtcattccacccgtggcccctacaaatctcatgtccttacatttcaaaacaaatcatgcattcccaacagccgcccaaagttttaactcatttgagcattaacccaaaagtccacaatccaaagtctcatctgagacaaggcaaatttcttccacctatgagcttataaaatcaaaagcaagctagtgacttcctagatacactgggggtataggtattgtgtaaatacagccattccaaatgggagaaattggccaaaacaaaggggctacagggcccatgcaagtccaaactccagtggagcagtaaaaatttaaagctccaaaatgatctcctttgactcctggtctcacatctaggtcatgctgatacaagaggtgggtttccatggtcttgggcagctccacatgtgtggctttgcagggtacagcttctctcctggctgctttcatgggctggcattgagtgactgtggcttttccaggtgcatggtgcaagctcttggtggatctaccattctggggtctagaggatggtggccttcttctcacaggtccactaggcagtgccccaggaaggactgtgtgtgggagtgccaactcatatttcccttctacactgccctagcagaggctatccatgagggtcccgcccctacagcaaacttttacctaggtattcacgtgtttccatacatcttttgaaatctaggtggaggctcccaaacctcagttcttgacttctgtgcatccacaggctcaacatcacgtggaagctgccaaggcttggagtttccaccctctgaagccacaggctgagctgtatgttgacccctttcagccatggctggagaggctaggacatagggcaccaagtccctaggctacacacaagcatggggaccctgggctcagcccatgaaaccactttttcctcctgggccttaaggcctgtgatgggaggggttgctgtgaaggtctctgacatggcctggagacattctccccatggtcttgggattaacattaggcttcttgctacttatgcaaatttctgcaaccagcttgaatttctccctagaaaatgagtttttcttttctatcacatagtcaggctgcaaattttcctaacttttatgctccgcttctcttataaaactgaatgcctttaacaacacccaagtcacctcttacatgctttgctgtttagaaatttcttctgccaaataccctaaatcatctctctcaagttctgtcttccacaaaatctttaaggcaggggcaaaatgctgccagtctctgtgctaaaacatnnnnnnnnnnnnnnnnnnnnnnnnnnnnnnnnnnnnnnnnnnnnnnnnnnnnnnnnnnnnnnnnnnnnnnnnnnnnnnnnnnnnnnnnnnnnnnnnnnnngacaaagtgtgaaattttggaaaggcctgtgttgacccaaatgactaaaatgaacaagatctacatcttaaacaaatagatatctttccatattgcaccaggcagggctgcagctagaaacagatggtacagtccgaagagctgagggaagatcgatagcagaactgctcacacatgtgtgggctcagctaagcatgaggcagtgaaacatgccagagccagcaaccctcaacctgtaaggggtgagagaatggggctgctaccagaatagaatgcagctatagaatagggccacgtagaccaagccggctggggcctggccaagtcaggatgggggaggtgggagaaaatgccctttccttcctgcctatccattttccaatctcctgctgccatctcccagtgtctaaacccaatcagaagttggcatgtgagaggtgttaacttgtccaagattgaaacctgggggctgatcaccaattaaaaaaaaaaaagaagaagaaaaaataaaagctggcgtccttcaacgttccttgggaaattggccatcgcccagttcttaggaacgtcaatcctgtgcaacgttcctgtgcaacattcctctgggtcttggacccccagagatagtagttcccccatacactcacacactcaactgacagaaaaaggccaaagtcaaagtgtttgccacactctactgcaattgtgcagcccctcatcatagctagagagggatctgtgcttcttggatcatgcaacttaaattcccttagctgtcattgggctctcataacaactcccgactttgctagacctctgtgtattgctctagaattaagtgagaaatgaggaacccgagtggattccatctcctgactgagacttccccagtgaaagcctgagatgagtgctctctagtcattcgcttttttcgcactcagcagggaagccagatggatgcaatctgaagaggtcagactccatgcagagcaagatgaaaagtatgcggatttagaggcagactatgccagacctcatgttgggttttgggagtctctctctctcactgtctgtctctcatttaagttgtataatcctgtccacagtttatgcattagaaccttaagctgtgagagactgggttctaggctcaagctcaggaagtgagcatgctaaggctgccaacagggtctcagcagttgatgggtcacagccaatcagaactctgtccaggtcacatttactccactgtgactgatttcacttttacagcagcactgacagggctcagggagatagctgttgacaaagttgatttctgcccatctctgttagggattgatcactttgtatttcccatcatctttatatttaatgtatttaatgtctggcaaatcctcgggatagcaatactagcaatcacattaatagctaccacttaagaattttctatatgtgcaccatttcttacatttatcttctattctctcaacaagcttatttggcattttaagtattttataaaacagtcttagagaagataagtaagtcgcttacattcccacagatagtaagtggcacagctctctctaaacctagattcaaactcagtcattaaactacactttagcacactaattgcagcattatgaaatagcgcaaaccttaagataaatgactcttttcttgtattcctggaaaccgttaggtgaccctagtgtctgacccacgggccaaagtggaaaaaaaagtatcagaggtcataaaatgtttaagctgaacaaatctttaaagacatgatagctaaccccttgtttgaaaaatgggttttagtttactgacatcatacctagaacctagaactctgaccccaaggctatcaagctaagctggaacagaccttcaagtcccacagattaaaacagtgaggagatgtgcaacacagtgtcactggtgagactgctgtctacagagactttcactatttctaagaaagaaaatctgaaccggtaaacactgtttttctctgtttctgccaataaccaaacaaatttaactgctaattccccacccaattaatacaaattaagaccccctaccacttcctttttgactggcatcacaataataattcaggggtattagagttcctgtatagaaacctgaaaccttggcatagacacctaatctctgtgtgtccatgtcttcatttataatatgatgatgacagtacctttcctatttcacctcaaggttattatgacgatagaatgacggagcacagaaactctaaggatgctaaattatatgtctctgatcaaatagcccatatgtagtgtggatttgccctgtgcccagcagaatgttaagtcacgcaacaataagaatccgagttgttaaaggcctttgaggtccttgaggaaagaaaaaatattgtgttataaaaatgtacgcttagtataaactgtcttctcatgctaaatgaatttgatttatcatacagctccaaacatgctcctatgtggctgccccaatatgtacacagagcagctgtgtggaggatcagaggtctgttgtaatatctcatgggaccgctatgccctcttatgcttttaaagggatgtcgccatatttcaaatttgaatttaataggctgaattatggtcacatgtatgaagatcaatgattacctagaggcatatctaagaatatgaggaccattgaaacagactgcattttgtaactgtgaaacccaatgagtttcaatactgcgcaagctctcaagagagaaattgctcatctaactctgctgattaaattctgctgtttacttaaaggtgggcataaaacctttgggaaagaaataaatgatttaaaaatcactttaggttccaaaccattaacggaagactgatgaacacaactattcccactgaacgtatttttaaccaactcatcattttaaaactcatttagtcctgatttgtgttaaaaagtggacaccattgattgttgctttttcagactacagatccacatacaccaggggaaatacctaattgagtagcattcaaagctggatcttaattaactagaaactagaggcatgttcattttcattatatgtaaataacaaagtgaccctcaagcaagaggcataaacccctctgcatctgaaagtcctcaatgaagaatgaaggggaggggttagatgagtcctcagttcccttccaactccgacatccttgggttctgagatttttccaacacagtgaatcccagtaggcagcaaagataaccagggcaataggatctgtggtgttgcacatagcagttaaccacttacggtgtattcccctatacacaggtcattgaaagatgctacaattgaattgtgctctgtccacatttttttgtagttctttgcattcacagtagctactccgtctctctttgctccattagctcagctggggtctgagaacctacagccaattctctccagctgaggcctctgaagcacagctgcaaatagataggttgatggaaagtctgggttcattcccagaactgcgtcttggggtctgcaccactgcacagggatatgtcaagggtcagttgcccagcatgtggcaaagccctttgtgctcatgtgaggaaaagtattcttaggggaaaaatttctactagcatcttataggccaaagctctagcacaatttttcttagattttttttttcaaattctaatgaaaataataaaccaaattctctacctatccttccgtaatagacaaatgttgacttctctaattatcgccttgagactttgtgtgggcttgtttgttatcaatggaaaaggttccattcccactacaatgtggaaagaagatacaatgagaccttccaaaggcatgcatgaggaacaggaagctgtggctccttggcccctgtgaagtctttgctttatggcagttatgcaaactatgggcagggactgaattgtcctccgaaaaccaagggcactgggatgagagggagggggaggggaaacccaatggcatcaagagagggacacttcatggaactgaaggaagactcttgtggctgaaactcagagaaccaaagaaaagcagggcagaacatccagggactttaactagtttgttctaaaactagggtgattactttgcctcaggttctcccagttttttttttattattatactttaagttttagggtacatgtgcacaacgtgcaggtttgttacatatgtatacatgtgccatgttggtgtgctgcacccattaactcctcatttagcattaggtatatctcctaatgctatccctcccccctccccccaccccacaacagtcccaggagtgtgatgttccccttcctgtgtccatgtgttctcattgttcaattcccacctatgagtgagaacatgcggtgtttggttttttgtcctcgtgatagtttgctgagaatgatggtttccagcttcatccatgtccctacaaaggacatgaactcaccatttttatggctgcatagtattccatggtgtatatgtgccatattttcttaatccagtctattgttgttggacatttgggttggttccaagactttgctattgtgaatagtgccacaataaacatacgtgtgcatgtgtctttatagcagcatgatttataatcctttgggtatataccgagtaacgggatggccaggtcaaatggtatttttagttctagatccctgaggaatcaccacactgacttccacaatggttgaactaattgacagtcccaccaacagtgtaaaagtgttcctatttctccacatcctctccagcacctgttctttcctgactttttaatgatcgccattctaactggtgtgagatggtatctcattgtcgttttgatttgcatttctctgatggccagtgatgatgagcattttttcatgtgttttttggctgcataaatgtcttcttttgagaagtgtctgttcatatcctttgcccaatttttgatggggttgtttgtttttttcttgtaaatttgtttgagttcattgtagattctgggtattagccctttgtcagatgagtaggttgtgaaaattttctcccattctgtaggttgcctgttcactctgatggtagtttcttttgctgtgcagaagctctttagtttaattagatcccatttatcaattttggcttttgttgccattgcttttggtgttttagacaggttctcccagttttagcactgagaatatcacatgccaggaaaccctatatcttaagcaaatagggacaattgtctcaggactgtcctggttcactgaaaggcccatatcctgggtaattcctcagtcctgtgaaaaatggaacaattgatcaccatacctcagagtaatgaaatgccatcaatggaaatggcatgatcagatttgttttacatttctattttttaaaaattgcacagctgcttgtagagaaaggatcaaataagattacaaactgagcctgggagatggactagaaagctattgtaattttgatgtagaattggataaaaataaaaagaaagtaagagtagttgataagagaggagataagggatacagggattcattagccatgagagtgactcccaagtgtctgctttgcacaattgagtaagtaactagtcttttcagtgagaccagaaaggggaagtaggtttgggaggtaaaaagtcaggagttaagcaggacatgtgatattgaaggagctgtggtttttagatgtcattactaaggagttggagcttagtgaaagcttactatgtagtctaaatctgagagggaaagtctagaaaggagatatataactgaagttatcaaacagtagttgaagcctctgggaattaccaatataaactaggaagaaattgtggagtaagacaggggtctaagcattgagcctggagaaaattcagtagttgaaaatgtggtaaaggcagataatctaagaaagaaggctgaggctatgttgccggagaggtaggaggaaaccaggaagatgctatcatggaatccaaggcacagtggctttcaggaaaaataaggaggtcaatgttaagtggtaagggaacctcaaaaccaccactgcaggctgcagctgtgcacagctggggatgtctgtcagccacaggagtctagctgcagtttctttttcataatataggacaaacctagggtttatctgaatacagcttctgaacttgggtgaaagtacatccctgagacatggccacacatacttaaacagctcctgaggcttcttttgcattaaaaaattctcataccaggctggaaaaatttccatagtgccaaaaaatagtcagaggttttttattgtttaacttttattgtaagttcaggggtgcaagtgcaggtttgttacataggtaaacttgtgtcatgggggtttgttgtatagattatttcatcacccaggtattaagcctagtagccattcattatttttcctgatcctcatcctccaataggtcccagtgtctgttgttcccctccatgtgtccatgtgttctcgtcatttagctcctacttatatgtgaaaatgtggtatttagttttctgttcctgtgttagtttgctaaggataataacctccagcaccatccatgtccctgcaaaggacatgatcttgttcttttttgtgactgcatagtattccatggtgtatatttaccaccttttctttatccagtctatcattgataggcatttatgtttatcgcatgtcttcactattgtgaatagtgctgcaatgaacatacacatgcctgtgtctttatggtagaatgatttatattcctttgggtatatacacagtaatgaaattgctgggtccaaaggtatttctgtcttttggtctttgaggaatttccacactgccttccacactggctgaactaatttacactcgcaccaatagtgtataagtgttcctttgtctccacaatcttgtcagcatctgttattttttgactttttaatattaataatagccattgtgactggtgttagatggtatcttattgtggttttgatttgtgtgtttctaatgatcagtgatgttcagcttttttcatatgattgttggctgtacatatatcttctttcaaaaagtgtctgttcatgtcctttgcccacttttctgtggggttgtttattttttgcttgtaaatgtttttaagttccttccttatgccatatataaaattaactcaagatggattaaagacttaaatgtaaaactcagaactataaaaaccctggaagacaaccaaggcaatatcattcaggacataggcatgggcaaaaatttcatgatgaagatgtcaacagcaattgcaacaaaagcaaaaattgacaaaagggatctaattaaactaaagagctgctgcactccagaaaaaaaagaacaacaacaacaacaacaaaaacctatcaacagagtaaacagacaacctacagaatgggagaaaaaaattgcaaactattcatccaacaaaggtctaacgtccagcatttataagtcagagttttaatgtctggaaaataacttccatgccctcacttcttttgaaattatatgtggtgaggagggggaggtgatatggtttggctgtgtccccacccaaatctcatctggaattgtcgctctcataattcccacgtatcgtgggaaggacctggtgggaggtaattaaatcataggggcagacctttcccatgctttttctcatgatagtgaatacatctcatgaaatctgatggttttatacaggggagttcccctacacaagctctatcttgcctgccaccatgtaagatgccccttactcctccaccatgactgtgaggcttccccagccatgtggaactgtgagtcaatgaaacctctttcctttataagttacccagtctcaggtatatgtttattagcagcatgagaacagactaatacaggaggactatattctttgtctctagctgatgccagaaaaaatatatataaacgctctctgaacatgcacataattgtaaatgtgtgccatcattacttttaaggtgttaaatccaactaatgagcaaacattaaaatttccatgacataccagtcatctcatagtcaattaatgaggtggttttttgtcaattattaatttacaagtcaaataaattatctatttcatggaatccttgcccctagagactcagaggaattcttaaaaggaatctacaccaatgtcttgttttgtaaatgaggtatgtgggaatcaaagagatgaagcaacttgtcaaaagtcactcaaacaagatttaagatcaggtctgcagactcctactctagtgttttctcctacatcattcaatggaattatttctcttcttgatattttgtgttatatggcagtcaaaaatttccatttctttctgaaatgctgtcaccgttatttccctgagggacagcattatattttaaggctcatttagtttatagtgtttaggcaaaccagacgcattttccccagatggaattttcatgatgagtcagggctcccccaagaggcacctcctaaatgtcccacaaaatgactctgtgcactaaatccttgggccctgatgatgaagaacccaatccttgtgggcataggggttctaagttcttcatggaggctcctcacctccagatcctacacagaaaactagaatcacgagggttagcctcaaacctaaagactgtcctgtttaggctattggaatcaatactgctttatgagcacataaaaagtcacctgctaatatgactagagaagtccttggagccctgtttacaagtatattcttgagtaaccttggtttcctgaagttcctacatttaacactactccttaagggcccttaaaacagcacttggatttaacagggttagcattaaacatgcacttgtcaaatacaaagaaaggtacctcactgctaggttcaggagagacaactcagctaataaatacccatacttcatcattgactatcatatagcagagacaggagcattaaagtcttgaaagcagtcatgaataataagctcacagaagtgggagctgcgggacctaaattacagttttcaaacaccagggcaacaactgagtagacacctacctttttcaagcatcttccagtgctcacatgtactaaacctggcaagattcaatagaaaagaggtaggaaaaaaggatgatgctttagactctgctgaactaccagaggtgacattgccagaaaggcctggtggttgaggaagtgcccatagcaaaggagagcgcttacagcgggtttctactgtgttagcacccaaaaaggaggataagaatggagggaaaactgtccagaggtgctcaggtactggttttcacttattacattaaatcaactcaacaaaggggctccagacccagagagaacatggagaccctgggggctcatgcagccactgggatgcatgaaccactagaggagagaccacgcacatgctgaggatgcatgaaccactacagaacacagaatatagacactgaggatgcacaaacctctaggtatgagaccgcgcaggcactggggaggcaggattccctagagatgaggctgtgaaggcactggggaggcaggaatccctagagattagtcagtccaggcactggagaggcatgatgcaccaagggtgagaccaagtaggcactgggaaggcgtgattccccggggatgagacgatagagacattggagatttctcctcttgtgttgattgcctctctcttcaatttattttgctaatttgctcttctagaatcttaaaataagattattgattttaaacatttttatgcttaatcgtttaaaatattttttctgtatacactatattagttcattacacaattttaatatgctgaattttaactttctcagttgaacgtatgttaatatttctcttgtgatttcttcttttgtccacccattacatagaagtgtgttgctttattgtaatgtatttggggactttcagatatctttctgttcttgagttatgttttaaaatgtcatgatcggggaaaaattgtgtacgatataattttttttttaatttactgagctgtgttttacacaacacttggcgttaaacctggcacctgacttatcctagtgaacttcaaaggaatatgtagtgttctatcattgtggtgataggtagtgtggtccagatgctctgtctttactaaatgtgtttcctgttttactgatcacaggaaatggagtgtgaaaatctcccactatgttttttagtttatctcattttagacttgtaaacttttcatgtgtctttacacagtgttattaggtgcatacacatttagcatttttatcctttttctttttactaattgacctttttataattgtgaaatatctctatctctcaaaattttccttgtcttgaattctaatttgccttggagaaatagaatcagtccaacagttttatgattagtgtttgcatgtcatacttttcatcccttcacttctgatacatctgcatcttttatttaaggtatatatttttaaacagcatatagttgattctttcttttccaatctgataatcactgctttttaaatagtgcatttagtccatttgcatttgacataatttaaatctgttttgtcttatgtctaccattttccttttatttgtttcatatttatgcattcttcattcatttttctgccttctttagaatcatttgggtagtttttaacattccattttatgtcttctattggatttttagctgtatttctttgctttaaattttgagagattgtcgtaagtattacaatacacatatttaacctattacagttgacctttaatcactattatttatgccatgtaaaacagaaatagtattaattaaacacttacaacagtgtagtattttaccactcatgtttttttttcattgctgtcatataccatacatctacatatgttataaactccatgttagaaaacagtgttttagtgtttgttttaaacaaccttttaaatatgtcatttaaagacattaagaaacatgtaaaataactattttctacttaccctccaatttactatttccaatacccttcaattcttttttccatttaatttaatttccctttggtaacttgaacctcttctatggatttttgtaagtgttggtctcccagagacaaatgatctcagcttttgtttatctgaatatgtctttattttgtcttcattttttgaaatgactttttctagatatagaattctatgttaataactattttcctcttacagcattttaaaggcatcattcaatttttttggactgcatttataatgatgaaagtttagccgttatttttattgttattatcctacatcaatgtgttctttttacttcactactttttaaattttctgtttttgcttttgaatcaatctaaaataatacagtttgctttgtgtttatcctacttcttagatctctaggttaatatttttttcagtaaatttaaaatttttcaggcattatcttttcaaatatctttttctaccccaatttttctctcctctttttctggcactccaatcacatgtatgttataccacatgacattgaacatatgttttttgtttttagtgatttttctttctctgttttaatttctattaccctatcccaaaacccactaatctttcttctgtcctatctaaactgctgttaagcctatcgggtaaaattttcaattcaactattgtgctttgtagatgtagaattttaattttttaaatgttaacttgtatgcagagtccctatctgtcatattttttgttttattttttcttaaatctttgaacaaatttataatatcaatagctattttatagtccttatctggtaagtccagcatatcttggaatagtcattttgatggctttctgaaaattgtagatattatgctgcaggttctaatttgtggtaacttcattggaaggatgttgagttttgttctatgtatttactagctgatcagcttcaatctattaattcttacttttaagctttcttaaatgctctggccttgcctgagtctcagctggatgcctatggtgtttactatggcttgtcacacctccagtgtttgccagagttgtgcagccccaatcccatgtagcttctagtagctattttctgcagagctttagggaatctgagcatgtacaacttagtatttggccacaggctcaagataacttctatacagatttctgaagctcctcttctgtctctacacttcttgttttataacctgttcctcacattccacctgcctcggtggccctgaactttattctgtgttttctccaccgagcattatcactgcactctggtctccatttccctatggtatggtttggaaaggatctgcagcaagaaagccaaaaggaatttaaagttttactcatgaagttattttctcccaagggccacagtcctatgctctgtttagtccaatgcctaaacacagttgctccatgcagattatcctgcagttgttccttctgggaagagaagtctaatacccattattactgcataatggctcaaaccagaagtacaagcattacttttaatatgatgaaaataagccttttatcagtatgcattaaataaattgagagataccatggtagcaccatgctataattgaaaacaagcctcttttgcattggaatttagtttctagcttcatgacttcaattaatcacttaacccatctgagcctcaatgttctcaattctaaattaagaagagaatattagattacatgtaaaatgtttcctagttgtaatatgttttcttctgtgggacaaaaaaacatatgatttcaagttttttttttttttatttttcattttggtgggtacatagtaggtgtatatatttgtgggatacatgagatgttttgatagaggcatgcaatgtgaggtaagcacatcatggaaaatgggttagccatcccttcaagcgtttatcgtttgtgttacaagccattcaattatactttttaagttatttaaaacctgtataatgaagttattattgactacactcaccatgctgtttgatcaaatagcatgttttattcgttctttctattttttgtacctattaagcatgtccccatccccttccaatgccccactacccttcccaacctctggtaaccacccttctatgctccatctccataccttcaattgttcttatttttagatccaaacaagtgagaacatgtgatgtttctctttctgtgcctggcttatttggcttaatatgatgacatctagttctatccatgttgctgcaaatgacaggacttcattctttttatggctgaataatactccattgtttttttacataccatttttttaaatctattcatctgttgacggacacttaggttgcttccaaatcttagctattgtgaacagtgctgcaacaaacataggcgtgcagatatctcttcaatatactgattttcttttttgaggttgatatggtttggctgtatcccacccaaatctcaacttgaattgtatctcccagaattcccatgtgttatgggaggaacccagggggaggtaattgaatcacaggggccggtctttcccatgctattctcatgatagtgaataagtctcatgagatctgatgggtttatcaggggtttctgcttttgcttctcctcattttctcttgcctccaccatgtaagaagtgcctttcacctcccaccatgattctgaggcctccccagtcatgtggaactgtaagtccatttaaaccacattttcttcccagtctcaggtgtgtctttaccagcagtatgaaaacaaactaatacagtaaattggtaccagtagagtggagtgttgctgaaaagatagccaaaagagtgggagcaactttggaactgggtaataggcagagattggaacaatttggaggactcagaagaagataggaaaatgtgggtaagtttgaaacttcctagtaacttgttggatggcgttgccccaaatgctgatagcgatatggacaaaaaatcccggctgagggggctcagataaagatgaggtactgtttgggacctggagcaaaggtgcccttgttatgtttatgacaaagaactggaggcgtttgggccgccctcaagaatttgttgtagacagaacttgagagagatgagttattggtatttggccgagaaaat

SEQ ID NO: 15 - DNA, 30 bp, Artificial Sequence
  Description of Artificial Sequence:  Synthetic Primer
ataaaaatggctttccatgtggaaggactg

SEQ ID NO: 16 - DNA, 31 bp, Artificial Sequence
  Description of Artificial Sequence:  Synthetic Primer
tcactgtaaattatcttccagtcccagaccc

SEQ ID NO: 17 - DNA, 18 bp, Artificial Sequence
  Description of Artificial Sequence:  Synthetic Primer
gctgcataccatctctcc

SEQ ID NO: 18 - DNA, 21 bp, Artificial Sequence
  Description of Artificial Sequence:  Synthetic Primer
ctgtgtatgggctctggtacc

SEQ ID NO: 19 - DNA, 119040 bp, Homo sapiens
  modified_base (2347)..(90873): N = A, C, G or T/U
atgtgatttaattgttcctgaaatcaaatttgttttcacgattttcatattcatagtaaaaaaatgtgcttgtgggctcatggccatttctgaattgaggactctctatcgggagggtggagccagggccggactatcgtggctggcagtgtcagggtggagaacaaatgaggccctgaggggacagcataaggtgttctgggtggtgggtcctcatttccgttgtgatgtaagtcaaggaataacatgccctacccccaggactttccccaacctgaaggcaaaaccttgtaaaggctttattttgtgttttgaattaaggcatgaaacccaacttatgaaataagtctctcattcactcttgaattacagagtaagtgaattagtagtgctagaggccctaagtgaggcaggttggaaagggacatgtcactcaggaaagatgccaagagagaggccctcaggagccagaggaagcttgaaaacaggcagaactttggggcaaaggtgcaggcactttgaggaggacatggaagagataatggccgatcccattgaggcaagagggaacaaccagaagaactgaccagattttacgactgtgctaattagaggagttaggcctgaaaataacacactgtatttgatttcaacgtaagaaatcaattatggcagagtgtggtggctcaccctggtaatctcagccctttgccagtctgaggtggaagcctcactttgaggccaggagtttgagaacagcctggacaacatagcaggaccccatctctataaaaaaaaatcttcttaaaaaaagaaatagattactttttctattaagcttaaagggaaattggttatttttgttttctctgtagaaggttggcaatattgtatgactttgtgatcgtggcacatggctgaattctagcattacctcaacactcaaagtgactgtgtcttttccagttaaaatttttcaagtaaagggcaggaaaatatggcaaaaatatgtttccagtagtggactggagggcttctttgcctaaggattgttgagaaatctgttggctctcttttttctggtatggcttaaaatcatgaactgaaggagtaagagtaaatatgtatatgtaactatacctgcatagtagatgtgcttatggttacatcatagagaggatgagacttagaacaattaagcaatttgtcaataatcacatcattgtctgagttagagattgatatagaatattaagacctcaaagtcctttcccctacagcacactttagtcttcagactattcatctttaaaataagacattttgtaaagtgatggctaaatttcttccagctctaaaaaattatatgacttagtcatattcatgattcaaattataagacaagttaaaatgaagtagtacatgttgaataaatgaatgaactatagaaattggccttgaaatgttgcatcaatggtcttgatcttccagtggtctctcctacatcccctatgtgaagatgacttgtcaagtcctgctagtgatactgtcagtgtatctcctggtcacacttggaaccttcccactgtacccatgtttgctctctattaggtagactgcattccttacctggtctactctgataacccccactcatctctctgatggcagcctgcccacctcttactctcccatgcccactttccatattactacctactttagtcagtttgggctgttgttacaatttaccatagactgggtgatgtacaaacagcagaatataatttttataattctggaggctggaaatctcagaccagggtaccagcatgattaggttctaaagatggcagtattccaggttgcagactgtacacttctcgttgtgccctcacatggtggaaagagggtgagagaggtctctgacctcccttaaaagggccctaatcccataatgagggctccaccctcatgacctgattatttcccaaagaccccacctctgaatagtatcatgttgggattagagtttcaacatatgaattctaggaggacaaatattcagtgcattgtatcatgagagcttctgtttgtagatgaagtcagactctaccctacttaaaaacttctgatgacctaaatgtccacggtgatgaatatgtaattcatgatgtatcaatccattcaagtcattgacatgcaagatgttaatgatatattgatcaaacaggtcacacgatgaaacgaaaagctttggcagaatatagactccacgaatggggtatgaattctagaattcttcctttattactcttgacatatatggcttctatacgacgagatnnnnnnnnnnnnnnnnnnnnnnnnnnnnnnnnnnnnnnnnnnnnnnnnnnnnnnnnnnnnnnnnnnnnnnnnnnnnnnnnnnnnnnnnnnnnnnnnnnnnttcaggaacaattaaatcacattcttcaggtaagagcattacttaccaacaacagaaaactatcaagccaagagtagacttcagatgagtcaacagttcccagccacggcttttggtatttggcatgcacagcagtgaacccgatgtctgcgactgcaggatgtgacaatgcaaaggggacgctgatccactgcaacagaaagtgacactggagccctaggcgatggttttcaactgtctgatatatgcaagatttgtacacctcacacactgcacagctcagtagttcctctagttcagacagagaaggatcggaaatcatgttctctgttttttgttgggcaccataaaatactgatttagatgaattaaaataacacattgactatttcttttctttttttttttttttttgagacggagtctcgctctgtcgcccaggctggagtgcagtggcgggatctcggctcactgcaagctccgcctcccgggttcacgccattctcctgcctcagcctcccaagtagctgggactacaggcgcccgccactacgcccggctaattttttgtatttttagtagagacggggtttcaccgttatagccgggatggtctcgatctcctgacctcgtgatccgcccgcctcgggctcccaaagtgctgggattacaggcgtgcagccgcgcccggccacattgactatttctatgcttgatttatacatgtcatacaaactatagcagcagcaacataaaacctctaggaagaaaatattatatttgaaatatctgtcaatctatctatgtatctatctgcctacctatctatcatctatctatctctgactgtctatctacacacacacacacacacatacataaatagatacgtagctattgagatatatatccccttgtgtgtgggtggggggaggaggggagggatgtggattgtttttgttttcctcttctgttaaatgttggataacacaaacttgagttctaataaagaattgtatttctcagctgcttgggaggctgaggcaggagaattgcttgaaccttggaggcagaggttgcagtgagccgagactggacattgcataccaacctgggcaacagagcaagactccatctcaaaaaaaaaaaaaaaaaaaaagaattgtattaaaaaataaataaataaatggtgccgagcactgtggctcaggcctgtaatcccaggactttgggaggcctaactgggtggattgcttgtgctcgggagttctagaccagactgggcaacttggtgaaaccccatctctaccaaaaatacaaaaatcagccagatgtggtggtgcacacccgtagtcccagctactcaggaggctgaggtgggaggattgcttaaacctgagaggcagaggcagcagtaagtggtaattgagccactgcactccagcctggctgacagagccagatcctgtcgcaaaagaaaaagaaactgccaggcacagtggctcatgcctataatcgtagcactttgggtagccactgttagaggattgcttgagtccaggagttcaatatcagcctgggaaatacagtgagacctggtctctacaaataataataataaacaaaataaaataaaaattttttaaaaattatatttgaaatatatatccatataaaagtgtgtgtaggcacacacacttttatgttttctgtgaattagggaaagatatccattccttaagggaaagatatccattcattaaagtaataagaaaatatgtgattgagaaatacatgggtgacatataagccttcaaagatgggcccaatactaacaggtagaagaataaagaattgaaggaagagatgtttagatggagcaagtcaaagaggagaagaataaatggggtgtgtgtgtgtgcgtgtacactcgcacccacatctgttggtgacaggctttgctggcaagggagtagcttggggaaatgggagagataaagatggatgtgtggagaaaactcaaattgcaagctaaaggatttgtattttgtttttgcaggcaactggaagctagaaaaaattcttttaagtcttaaaaagttttcagtggaatttattctgaaatttaataacatagacatgaatggtgagtttagtgaaaaggaagagtcagggaaagtggtaggtgatttcaattccacctagatgaaggctgaagtaaagcagtgacactgggaatgaaaaaatatcggtactaaaaaggattatgaagagtgagccaacaacccttacaagaaggagagagaggtcagagagagggaaaatgaaaagaaaaacctcaagtttacagttttggagctccaggggtgatgataaaatcaatgacattagagaatttgagaaaagaaggtggtctaaggggtaagttgattaattatgtatgctcacacagcaattaaagtttggaaaacaacattatttagtcttttattcaaccaattcaatagggccttctctagtaaccaacagaactccattccttatcaatttggctacattttgtggcaggaaaaatattctaacatatttgcactgtcatctttacacttgcatacttgatttatgcacccgtgggttttaagttctagtctcatacaaagcaatgagaaatcacatatatcatcaataacaggttcattccctggggttgtgtttcttggaatacctagtgcatcagttatgagagctgtcattgccaaaccaacctggctcctgacattctgaagagggatttatttctatgttccctattttatttctggaagtttatgttgatgctaaggaaaaatcagaatttcagcacggtccacttaattttggtaatttaaatacaaaatagtgggagtccttgagcaaattaaatattctcatattcagttacaatatgaatggacgaaattccatgaaatgcaaataaaatgtctaaggagaaaagagaaaatactataatctttgctagcgtatgtaaatttatagttaaactgcacatctaattgtagtctgttttttacaatttttcctctaggatattattagagatgatggaaagtttataaaaaggagagaagggcatgagattacttcttcatttttaatttctaagtgtctagtgtcaaaagtaaaatataatgaaatgctttaaattgtaagataaataaataaagatgaggagaatcaagagtacttaaccatccttgggaaaatgaatcatgatctctagtgttaggttgctcagtctgtggcctttgcaggagggcattgcccctaaagaatctacaactgggataatatatgtgtatggtgagataatgtacatgaacctatgatgaccctagcccagcatggacacaccagtttttattcttcttttgatacatcttaggtattgaatattatatgcataactgtactcttcacatttcttcaacattgactaaaatatgttcagacacacaaaagtgcttttaatatagtgctaataatactaataatactcatgtctcataattataataaaaacaatagataataaatctttctggtgccttatataattaagaattttctttgtttttagaccacaaatagtgatgattaatatttgaaatccacagttttccaatgggatcatttctatgtcttatgagcattcttaggattcaccaactaacgtaaagggagacttgtacaagttaccactaaggtttgaattttgttatctctgccgagggaaatggattgccttaaatactaaaaggagatcatgcataagtttccatcaaatctaggcattaaggaaagcaagacctagacctttctaacagtccaatggagagcacacttttctgtcaaattttatcaaaatgacgagtttttcatctaattaatttatggagaaatttgaaatttcatgtatgtgacttagtatgtattactcatgagggaaaataatatttctactcatttttaatgagttagtataaaatacattaccttttacagaaaaaaaggaggagaatcttgggtgctcccacttaccagccctacaaaaatgcaaaagagctgaacgacatcagtgtaggccacagaatagagccctcccaccagtgtgtacagagtggcaatgagtgcagagatgatgacagaaatgtgcatatccacatcgatgatcacgctgatggtggctcctgaaacaaacaagagagttctgtggtcaaggtgcccagacagattctgctctttgtataaggacataatgaaagttcagtgataaacaacatttttctctctgtcatatgaaatgcagtggatgaaaacacctaaagttaatttttatattgaaatttgtatatcttaataaattcagtgagatacatactttttctttctgaaattactggtttgctaacttatttatttggaggacacacagatccatggtatggttatagaagaccctgaattactgagaaatttaattacattacaagaactcaaaataatttcactatctggaactctgactcaatcaaatacagccatgtgttgcttaccaatagggatgtgctctgagaaatgtgttgttaggtgatttcactgttgtgcaacttcacagtatgtactcactcacaaatcttgatggtgtaacctactacacacctaggctacatggtatggcctattgctcctgggctacaaattcgtgcagattgttaccgtactaaacactgtaggcaagtgtaacatgatggtaactatttgaatatctacacatcatatctaaacagagaaagtaacagtaaaaatatgctattataatcttatgggaccactgtcatatatgcagtccatcattgaccaaaacgtcattacattaccaaacgtcattagtcacatctatgaaaaacacaaggctttctgagaaacatgatcacccatttccacattttacaattgacattcatttgccattttgcatttactctgccccctactaggctttgatagctaacaaatggttaaggcagcaaagaattgagaaaaatttgtaggaacaaattatcaaattggtaaatgttattaatcaatttctccctctttaatttgcgacagatcactcttcttttatttaattggtagaacataccagtcctgctcctaggataccagtatactgaagagcctaagatttgaatatcatatttttaagtaattttcatcatcaacattttaaacttctcttagaaatcaaatttatgtttctctttataacattgtttattgtgtttgttggtccctatatttccactgaacatattgaggtatgaccagtttgggccgctgtggttcttggactgacagttcataattcacttgttgctttagtagccttttccctattgttctcaaaactatacagtttacatgtcacattattaaatgcatacatgtaatggatctgtgattttatgtatcatcagttgcagccagctgagttgtcttacaccctacccccattcctcaattggcatgctagtagtatatgcaacccactggagatgaaactacattatctcaatataagatgtgttgatccaaaatatcagtaagaaatatttttcagtgttttgctatggtgataaaatagaattattttccagagtaaagatcccttgaaaagaaaaatctagtaagaagttggagaatgaagacaaggatgagagataattatagatgagtgacttcagataactgactgagttattgttttatagatatttgaaaagttattttttcctgagatcatttacttcgaatcgaaactttacttccaacactttgtcgttctttttttttgtgtgtagttctccactttaataacgcttctaagctatataccatgaattatgaaaagttcaattataaaataaagattagctgactaaaatctcaaagatttggggtcctagtagatgctgtcacttaactgtaactcagagatattagagacgtcaatcacttctccattatcactattaaaattgagataaaattttctctaaaatattttctgaaaaattaaatcaattgtaagtaaaacaaagtgatactttgaggtataccaggaaatattagtctactcatgaagctataaaataagtatcctgcaaagttatgaaaatccactgaacttgagctgttagaagtgtaaatacacatttcttcaaaatgttgtaggatgtcaatttctaccaagaagatagtttaagattctcctatgtttcaatggtgaactatacacattcacagaaaggtggtaatagatcttatatattcttgaatatatcaaattatttgtaataaacactaaattttaattaaatccaactattactttttatttgtgtaaatttaaagattacaggtgcaatgatgttacctgggtatactgcatagtggtgaagtttagactttcagtgctttcattacccaaataatgtacatagtacccagtaagtaacttcacacacacacacacacacacacacacacactctctctctctctctctctctctctcccaaagagttcaagcaatagcagcaatgtttttatatatgttgtttgatatatgtgagtgtttagaaagatacagacaataacatattttacatatgtagtcatggattaggtaataatgttaccatcaatgatgaaccacaaatacataaattctcataaaatcataatgaagctgaaaaagtcctattgcttagtgacattatagctattgtattacaattgcctatagtattcagtgcagtaacatgttgcacaggtttgtagcctaagagcaatagactatactgtatagcctgtgtgtgtagtaggcgctaccaactcggtttgtgtaagtacactctatgttcacacaacatcaaaattgcctgctgatgcatctctcagaatgcatctacatccttaagctgactgtatattgtaatacaggcacaaacacagacacacatatatacaaaactaattataacaaagttcacagtttcgttactatattttatatttccaaaatactttagaagcatttgcttattaattctattctttcttcagggctctgttatataagttgatctttactcaatgagtgaacattttgtattttgttatatactcagcccactccttttttgatacctcagcaggtaatttgttcttaaaattaacattttttggtgttcaaagcaatggcaaacaagcgcccaatgcaactcagctaatgagagtcaggtggaaagggaggtgtagttttacacataatatcattagaacataagagcagcagtggatgtggagtattattatccagcaccagagaagtgcagcattttccacctagttgtttctttttttttctttttgagacagagtctcactctgtcgcccaggctggagtgcagtggcgtgatctcagctcactgtaagctctgcctcccgggttcacgccattctcctgcctcagcttcctgagtagctgctgggactacaggcgcccgccaccacgcctggctaattttttgtatttttagtagagatggggtttcactatgttggccaggatggtctcgatctcatgacctcgtgatccgccctccttggcctcccaaagtgctgggattacaggcgtgagccaccgcgcccggccccccacctagttcttgctgtattttataacgatcaaatactcttgtttcggcaacagtcactcttttttatagttggcaatcaaaaaaatcctgactaacctgcgggatgaaattggatgtgctgaaggcggggcagtgcacacctttatggggagcttccatctcccagctgcctcaacagcctcagtcaggtccaacagtctcaactggtcccatgtggtacacatctaagcctgtgtctctaagggtagattggagtcgaggagacgctaaggcatgggcaagctttctcatgtaagttattgagaagacatttaaactgaaggggaaattcttgttatattctaccatacttaaatttttccactactaaaccgtaacattgaactttataatatcaatttatggaaatatttcaagtttgtagttttgctgtgtgacttacattacttacctattctgtcagcagagggttggtgatatctcacttctttaggaatgttatttactgctggaactgactctgttttatatatgtttttaattaaacattttatttaaaaagtcaacatctctgaaaatatcagtgcttttagaataacatgcaacactgttgtctcaggagtttaggtagttttatatctgtgtttatgccaattaacatggcagttattagagggaaaacaatgggaggtaaaaagttctcagtttgcaggaagaacacttattggaagaaattaagatataaatcatttatttaaatttattcaacaccaaaaatatgtattagtattctcactaacccctggttcatgaatccttgttttaaacatttatgttaagtaaactgcactttttagctatgcttaattcattattctttgttcaaaatcatatatgactcataaaagcaaattgatcattataattcatagttattggtctaatgaggcaattcaagtatggaaagtgtagctgaggttttatttaacctctgccaccatattgcaagtaaacgtagaatttccattaagcttttatgcatataaatatggttcagcatatggttttaataaaaatgtcctcagaagccaaggctgaggaaagtaaggttgtgtatctgatgtttagttaactacaaagatgcagctagacaacttagctggtccttacccaaagcagagaaaattgctgcagcccagaacatttctcccatcagtgcaggaataaacaggagtccgcccatgcgttttccatagatttgctgaaacgggtctaacatggtcacatacccctttgaacgcataggttttgcaaagaacaggccacctaaaaattaagcaactgtttaggagaaaataaaaagaatgtaatataatagtcttttactatgctgccatttatcaaggaaaatgcattttccagaacacctgtatggattgaggaacaagtctgcacacagtaccaacctactataaatattaggtttagcaatctaatataatttatttagtacacttaccattgtatgtgtccaaaggataagtggatcatgttgaggtatgtgaattgaaaaacatgaaccagcacattgctcacttaaatgcctcaatgcatttctatctctcaacatagcatttagaggttttgaataagcacagattcaataaaagccttttgagtgccccaaaaatgaggtaccttctgttatataatacttttgacctcttattcatttgacttgctaaaagaaacacaggtacatttcaagttgattcatttttaatgatatatccatacttgttttgaaagaaataaaacatgattatgttaagaaattcactgtgctgacagccacaggtccagaggattttaaatatattcctaaccaagagatcaaataatttaagcattagtgttctgctacttaccagtttctggtaatgactccttaaagatctctggggacatttttttacaatggttattcagagtgtttgacttgttattccacttgttatttatactcttgttctgtatactttactgagtgagtcactgagatttgcactttcacttacctaaaatcagactaagagaatatccaattggtgcctgagcccaagctaggccataacctggtacataaactgcttcagctgtgccattgcatataccctcctccgacccaggtagctgaaacagaatgaaaagtgagggagtgatactgtcttacctgttatacctacatctgcctgccaaaccagtggctactagaagttactgagcacctgaaatgtgacgagcctagattgagttgttttaggaatataaaataaacaccagatttcaaatgttttttctttcatnnnnnnnnnnnnnnnnnnnnnnnnnnnnnnnnnnnnnnnnnnnnnnnnnnnnnnnnnnnnnnnnnnnnnnnnnnnnnnnnnnnnnnnnnnnnnnnnnnnnaaaaaaaaaaaaaaaaaaaaaaaaaaaaaaaaaaaaaaaaaaaaattagccaggtgtggtgtcgggcacctgtagttccacctattcaggaggcagagacaagagaatcacttgaacccaggaggcagaggttgcagtgagctgagactgcaccactgcatgccaacctggcgagagcaagactcagtctcaaaaaaaaaaagagagattgagaccatcctgaaccccgtctctactaaaaatacaaaaattagctgggcgtggtggtgtgcgcctgtggtcccagctactcaggaggctgaggcaggagaatcgcctgaacccgggaggcagaggttacagtgagtcaaggtcgtgccactgcactccagcctggtgacagagcaagactccctctcaaaaaaaaaaaaaaaaaaaaaaaacaaaaaagaaagaaagaaagaaagaaaggaacccacatacaaacatctttgatgtccttaagaaaaatgtaaaaggaacttgtgaccaaaaaatttgagtatacaaagaacacaaaataaaacatcctacatgttttctaaaataatcttaaagttatgttagttcttttagatactgttcttaccctaccaatttaggacactatgtactttttcaagaaaattacctactccctgcactcagtgaaatgaacttctttccttataccagatggggaaataaattaacttccaaacaaatggacagcctaaactagcaatcagtaaactttttctacaaaaaggaggagattactaatctggctttacaggcatacaatctctgctgcaaccactcaactccaatcttgtagtatgtaagcagccacagacaatacataaacagaggcatgctgcattccaataaatattaacaaaattaggcaggggcgatatttggcgacaagttctaatcaacaacccctgctctaaactaacatctttatacaaatccaagtgatgtttttgttcaatggaatttattttcaaaatggagacactggttttcnaaatcaaaatttaggaaaaaaggtaaatcacatagttgagttattttgtttcttagctaaaacagtattttctgaaacaccagtgatgctaagtgcttatactagtacatgtgaacctagccatctgatgacagatgaaccttaattttcactcaagattatactattataaaaaaataaaatatgaaatagcagttagaacattcattttaagcttgactatgacaaaactgagtatttaaccataaggctaattttaatcaagcttgaactataagagttctctaaaaaggaaagtcatataaaaccaattagaacttccccgtaaaagaagaaaaataagattgcctcctagtggttcactgtattaactataactcctaggtacattatagaaataatgattcagtaaagaaatttagagcaatgaacttactgcaaaaagaaaaactacaatttatactaaagcattctcctcaaagtcaacgcacctttccagtaattctctactttcctgcacatctctagtggaaagcgtaagaagcataagattagcataggccagcagtaagtctgtattggttgctcgccagtcacttttatcagactccaaacactgtaaagactccagatattcctattttgtggaatgaatagtaagttacaaaacttaatcaagtgttaagaaattaaccattttatgcctacaaattccttttctcactccaaccacgtttgtgaaactacattgatttttacatcaaccttataaatgaaaacaccaaaaatatacacatttatcatagttatctccccaattttcccattataaattcaactgatcctggtaaaaatttcgttttataactgttctacctaaataaaagaaatttaagtcctgcggggcactgctgctttagtacaaaaagatgtatgctaattgcctacatagaaatgtaaagacccaatagcttttatctaccttaagggtctgtacaacacacgaattccactctaaacttgaacgcaaagctatgttcctctctgcctcatggcagcgggccacagcatccttcaatcttttagttgagcgatacaactccactagccggatgttcacatggacgtcatcaggtcttacataaagttctgactgaatcaagtcaaaaagtttattccatccatcttcaccttcacaatctagaagctgttcctatttagaggggaaaaagaaaaattattagagtaacacttgtgcaattttaaacaagtcatgctcccaaaaagcaccattccactatgtctagttttatgatgatgccaccaaaaacaccatcctatataccttattcgtcccttctgagagttgcttacaacccagaaactaagcctcaagaactgtatgtgaagaaaagcatctgtgattactgcggtagctcatactctcttcagagactaccaggactattgccacacatccctgtccatctgagtcaccatcagaagcctagacctccccagtcaatcctcagcaacaaggtccttatgctcaaactgctctgtatctccttaaatctgactcaatcccgcatcccctctcctcccactgttctgttaccttcatcatcatctcaaagcactgtcatcacctcctgaccttaaatgaagacagtatcatctcaggataacccccactaccatgatggctttttctctctgaacttacatacaaggagaggaagtagggtttgtggccactcacttctcatttgcgatgctcttccatcagcctctcaagaagctaggaccataggcatgcaccaccatgcccggctaatttttttttaacgttctgtagagatggggtcttgccgtgttgcccaggctgactactcagttccttaatcacctcatctccagtgatgttatcctccactccaacctcaaccatccacttgccactgacacaggtcttcaaaatctgcattttggtcataccaccgaaaccaccataccatccttcttattcttccacctcactgagggcctacatacccttactttcagaaataccacatgacaagctcccttcaagacaataacatcatcaagttttaaacacctgtaaacacatataaatacacacactttcttctgtcaggcaaaaaatgctataatcccttatatccataattactgtttgcttacagatcccttcaactaattccctcttttcctcagaaccctcccaactggtttctgtgtgcttagatttgggaaatcataaccccaagctaactgatttcatttgcattatctcaaccatcaaactggtgctgcctaaaacaaaataccattttagtactaacagactcactttctccactccctgacacttcacacctcctcctatttcctcaacttccccataccttcctttgaccctcactttcaacttataacctagattcatccttcactgagaaacctgatgctatcacatataaattccattttaccttacctacttaaactcgtctttccccaactctcaagaccaagccgcccattactactctgtatttcattcccctctctcctttatcaatttctcctcttctggatgagatggatgaaaccctggcctctccctattgcaaaagccctagtctttgactctatgttaaacatttttttaaaaaccactatgagtgcttttaaaaagttctatctcatacttgagagaaaaagccttctcaacagtaatactctcattcattaaacaaatgtcagaaactgtttaccttagcaagccttaaattttaggagaaatggaattactttgcatgacagttataaatctcatggatttcaattccaaaaaaaaaaatctgatacaggaaaggtgtaacagtgccttcaagttattaaagaaaatctttaaagaatgcttcaaagtatctaacttgttacactgcaagaaaagaatctcctaccattacatatgttctttaacactactgacaccagattaactggattgccacgcccaatatgggagttatgtttgaggcataacacctaagagagtaaagaaatctgcacaattagacctcatgttttagactaatatttaaaatccagctgcttattactggggagaaaaacttagcagtaatatttatctttggaagcatcttcaatgctttttcagcttcaaaaatctggacatgattgttcatagcagttgaacaatagccaaaacctagaaataaccaaaatgcccctcaaaagtgaatggttaaggctgggcacagtggctcacacctgtaatcccagcactttgggaggccaaagtgggtggatcacctgagaatccgggaggcagaagtggcagtgagccaagatagcaccactgcactccagcatgggcgacagagcaagactctgtctcaaaaaaatagaaataaaaaaagtgaaaggttaaattgtggaccatgaaatactactcagaagtaaaggaaccaactatggatatacaaaacttaatatggatcacaaatggtattatgctgactgaacaagccaacctcaaaaggtcacatgcttggctgggcgcggtggctcacgcctgtaatcctagcactttgggaggctggggtgggcagatcacatgaggtcaggagttcgagaccagccaggccaacatggtgaaaccccgtttctgctaaaaatacaaaaataagcgggacacggtaacatgtgcctgtagtcccagctacccggaaggctgaggcaggagaattgcttgaacctgggaggcggaggtggcagtgagccgagattgcgccagtgaactccaacctgggcaacagagcgagactccgtctcaaaaacaatgaaaaaagaaaaaaaaagtcacacatttcatgatgacatttacataacattttgaaatcaccaaagtataaagatggagaacagattaatgttgccagaggtcaggcatagtgaagagaagtaaatagcaggactacaaaaggggcagcatgaggaagatctctgtggtaatagagtagttctgtatcttgacggcagtggtggtatgaatctacacgtgataaaatgaaagaaaactatacatacacattgtaccaatgtcaaaattcctgattttgatattgtgctttgggcgggttaaacaggttgagtatcccttatccaaaatgcttgagaccagaagtatttcagattttgaattttttcagactttggaatatctgcaggatacttagcaggcagagcatcccaaatctgaaaatctgaaatccaaaattttccaatgagcatttctttgagcatcatgtcagtgctcaaaaaatttcagattttggagcgtttaggatttcggattttaaatgctcaacctgtataagcattgggggaaaatgaagtagcatataggatctttctgtgcaatctttgcaacttcctgtgcaaaaaaatctataattatttcaaaattaaaattttttaaatttctatcagaaacatatataatgggggtaggaggaggctaaaggcaaatatacatttataattttatattgtacatacacaataaagtatacattaatagataaaacattacaatatacattttaaatgtttgccaaacatatttgtgtagattttctccagaacagttacttagtaaactatattttactctataaagaatatcaggaccagtcaacacactagcaagaacttcctaccatttttagtaattacgtcttatatactagagaaaccaccttttatcttttgcttgaaaaccttactatctcaaaatacaatcccttccactttcagacaatagttattagaaaacacttctttaaaatatccctaaattgtcatcctgtaggtaattttcacttaatgaagcaaaaattgtatactagacagaacttaatgtaaatcttagctctacttagtttacagctactaaactgtaaaatccctaaaatattaattattccagaagggtaaatgagatgtcacttataaagtataacaatgcctaataagacagtagatgctgagaaaggttttaatacactttttaaaagaaaaatgttaaaggaaacacaaacacctgggcttaaggtttgctattgaaaagtaatttaaactccaaatattagaaatggttatgtcttaagttttctccctttatgttttgtttgtttacctttagtttataaattgcaggacttcctgggaaaagttttgctgctctttccacccagtattttgctcttccatcagtaacatcatttttacaaagcaattctgcaatcttcaacaccagatctttttgtgttgggtttaattccactgaacgctaatatcagaaaagaaattaaagattagtaaataaattgtatgtatgtatgtaggagtatatatacttatatacttatatataaaggttaaaaattatcactccaactcttaaaaaattctacttctagagaaaacatattacttcaaaggtgttaaaataaaagtgtcttggaattttctggaaatgaaccaaataaaaattatatttgtgtcatttgaatgcaaaaaacacaaaagaacaccatttctgaccgtgttagacttacaatttataggtgttaaacaattctaaatctgttccaagctgtgtcacgtaactgtactatgataccaatgcctgttttatgatattcataaaatatatttgacttacttatataaatttctctgggcatcatgtgtttggctatgcaaaggctatatttgaatcctataacttaccctgtaacattcaacggctttctctgtgttttcttccaattcataaagaagacccagaaatctgtgagctctgggatccatctctcgcacattaatgtaagtacatatgtatctgttttttaaaagtaatacaaaagtaaattaaacttagaactgtacttttaaatgctaaccgaagaatacatcttaaaccaaagcaaccactaaactcgtttatattgttactcaaaactaccactattcatacagataactcaaaagtattcatagaaagaaatgggtaatacttaaaaacacatacatagagttgaccacatactcattttaccattaaatgtcacatttaccaaatttttctccagtgttatccacacataagaaatgaacatataaattgctttttcttcctgatcacattttaataaagcactaacagttttgcaaataaattagaagtgattatagtaaacatttttaaagttatcataatgcaaaatactaaacagcaacaatttcccaaacaacaaagggaaatacacttaccctttaagcaagaaagtaatttctaacagtactatatatccagctaaaatcgaacagaagaaaaattactaattacagtaccaaatacaggaaatttccatttctcaaatcaagtaacaactaaaataagtaaatatcctctaggttccttgacagtattaccatcagagaaatgaggccagacctaaactaagggattaaagtctcacggtaaaaaggtacaagagttaacagtcacagtgctgctagttacataatttatgtaccaccattttcctttcttaccagcatttccatcttcctttggatgcctttaaaagcctgcctcccagctgggagcagtaacacacacctgtagtctcaacactatgggaggccgaggcaggcagactgctgcgctcagaagttcaagactagcctgggcaacatagtgacacctgtctctaccaaaaaatgcaaaccttagccaggtccacgtggtggtgcgcatctgtatccccagctacttggggcgctgaggtgtaaagatctcttgagcccagaaggcagaggttacagtgagcaaagatggagccagctgctgcactcctgcctgagcaagagagacagatactgcctaaaaaaaaaaaaaaaaaaagcctgcctccctcttaatttcctgctttaatccactcccagtcaggaaatcagaatcaccaagcttcttatccctaggatagagccttagagcatcacatattgtgtcaattaaagatcttttatacaagctattctcctgccttacaattacagtttaattttttattcattgctattttccatctgattaaggtatcagatatctaaccaaaaacaaattaagatataggcatggtcctcttttacttcaacagaagacaatttttagaaaaagtcgttttaagccaaacaatttcttgcccttggtataaagcagcagcatgcagaaaacactaattacagtttcaatctcaatggaatctaggctggtccttagcatcagtctgagtgataaatcccttattccagaatacacttaggaagaactactaaggatatatttttacctatttcaaagaagaaaatgagaaaaggcattgattttaaaaaaagaatacatgttacagtttgtacttactttttagcaagatcatattctttagcttcataatacagctttgcaaaatagaatcctctcgttgacttctaaaaaaaattaaaagttgttttacatttcatacagaaatattttccaacattttttcaaaagtagtaaaaatctgccctaagtttatgttcaaatatgccattttcattcacttaaaaattttttttaaagcctgacaaatgcataattccatgttttataatttcctatcacaaaacaaaaaatagagctgggtgcagcggctcatgcctgtaatcccagcactttgggaggccgaagtgggtggatcacctgaggtcaggagtttgagaccagcctggcgttataacatggtgaaactccgtctctacaaaaatagaaaaattagccaggcatgatggcgggtgcctgtaatcccagctactcgggaggctaaggcacgagaatcagttgaacccaggaggtggaggttgcagtgagccagaggttgcagtcagctgagattgtgccattgcactccagcctgggcgacagagactccatctcccaaacatcatcatcatcatcatcataaataagctgggtgcagttggtcacaactttaattctatttaattctagcactttcagagaccaaggtgggaggctagctttgaggccaagagtttgaaaccagcctgtgcaacacaacaagatcctgtctccagggggaaaaaaatagccaggcatagtggagcatgcctgtgttcctagctactcaggaggccaaggaaggagaatcacttgagcccaggaggttgacactgccgtgagttatgactgtgacactgcactccagcctgggtgacacagggagatcctctctctaaataataaatacataacatacaaaaaataaattcaagaaagcaagacaagcagacaacagaagttaagaattttcatcagccttggaaatcttggaaaccctgtggtaccactctctcacttaacaaacaaaagaaaccagctttctttggggaggaaaggtattccagaaatctcttctcctaccatgtgtaagcctctatgggaaagaataactaagtacttaggatctattaaggcactgaggattccctgtgcctcaatagtacatgtactgttctctctacagatcagatcagtattttacagtcaaggagtcaaaaaggcagaaataaatattgaattcttcaagtaataaacaaggtccacagcctggctccttggttacataaactccaaagtccaaaatgctgatgcacaccaggctgggtgcggtggctcacacctgtaatcccagcacttttggagactgaggcaggtggatcacttgaagccaagagttcgagaccagcctggccaacatacagaaacctcctttctactaaaaatacaaaaattagctgggcatggtggcacacgcctgtaatccctgctgcttgggaggctgaggcaaagaatcgcttgaacccgggaggcagcagtgggccaagaccgcaccactgcactccagcctgggcaacagaatgattccatctcaaaaaaaaaaaaaaaaaaaaaaaaaagctgatacaaccagagtatgttccatccatgtgatacagagtatacagctactcaaacatcttatttttgaaattccaagaccccagtgaatgtccaaaacgatgaatagtaccaaaccaggttgccatcaatcgaaacatgtttcctgtttgtgtcctccacccacaaatttaatgtcttgtccatctcaactaagcacttatcacacactgtggctgtaacttttgcagtttggggtgtcacaacaaaactagcacaaatttctttttctttcttcacaatttcatggacaaaagatttgttcttaccatagatcttagcacccccagtatatgatcttttttctctcctaagtcaaaaactcacctcttcacttaaaggaagcactatatggcttctctctggcatatgtgaactgccagcatcgctactcttgctctttggtgccattttaaataaaataagggttacttgaacacaagcactgcaatactccaacaactgatctgataactgaggtggctagtatgtaactagcgggtggggagcacatacagcatgaatatgttggacaaagggatgattcgtgtcctgggtaggacggagcaggaggctgtgagatttttatcatgttattcagaactgtttgcaatttaaaactcatgaaatgtttatttatataatcttccattcaatatttttggaccacgggtgacgcaggtaagtaaaaccacgtaaggcaatactgtggataagaagggactactgtaccagcaacgaacaatcagaaaaggaaattaagaaagcaattccatttacaatcgcatctaaatgaaaaaaatgcctgggaataaatgtaaacaaggaggtgagagacttgtatgcttaaattacaaaacgttgctcaatgccaggctaacacctgcaatcccagctctggcaacagagcaagactccatctcaaaaaaaaaaagaactatagcaatcttaacaaaaataatacacaacagtcaggacagcacgtataggaacaaggcttgttccccccttcctttttttgtttttgagatggagtcttgctctgtcaccaggctggagtgcggtggctcgatctcagctcactgcaacctctgcgtcccgggtacaagctgggactgcaggcgcacgccaccatgcccagctaatttttgtattttcagtagagatggggtttcaccatgttggccagatggtgtcgctctctcgaccttgtaatctgacttcctccacctcccaaaatgctgggattacaggcgtcagccacggagcccggccagttcccccttttcaaaatgaagaaatagattcaaggtacaatgccaaaacataatagaaaaataattccattaccttctttgcttccaactatgttattaaagtagacaatcttaagataattaaacaactttacaaattattcttctgtatgatcttttgcctctaacctgctcactttacaagggaactgaagctcaagcaggcaaatgccttgtttaaagatatatagctaggaaggagcacagcccatgttatgtaaacaggacaatatctgattcaagcagtacttctttgcatgacagcagatgtcactataagcaaatacctgaattcnnnnnnnnnnnnnnnnnnnnnnnnnnnnnnnnnnnnnnnnnnnnnnnnnnnnnnnnnnnnnnnnnnnnnnnnnnnnnnnnnnnnnnnnnnnnnnnnnnnnttccctggatttgaatccttcttttctgtaacttcggttttcttccatggcggtgtctcgaatttggattaactaatttgcgtagacttttctatttgtatttgttattctaagtccagtttcaagttcacttgacattgcaaggatgggtaatgagtatattggattaaactaggtcacagaatgaaaggaaaatggtgtttggatagatattattatgatctttctatggatattgggggtgttattgaatttgttagaattttttcactgtaattacttttgaacatatatggcttttataagaaggagattgttatggtatctatgttacagacattctgcttagcccaggtgagaccatgataagacagacgtccccagaacccagagcccagtgagagagacaggcagttaatgaaaccttaatacattgtgctatggcaactcatttatcaattcattcattcattcatgtgaccaatatttattgaatattgactttatgccagaaagagaagtagcagtaatctagccaaaagtatgcttccagcttctcctccaaccactccctcactcacctctcatcataccaaatacccagtggtctcaactgcctggtcgctgtcattattttcttttttcctattagtttctctctcaggtactctcttctccctccatctccacctgtggaaatgctctcaaagcctatggacaatctgcacttcatttctgcaggttttcctgttaacatgcagctaccctttctctcttcttaccacctttttctcatcacaaataattaatggtttatcattttaattcccatacagacctctttatatcatgcaacaaattgcattatagtttaaacgttttttattgtatatgctcaataagaaatttaagcacattccaatataggtatgtatatctatcagttgcttatatattctgtactaacgtatgatgtaaatcatttaataaaagcaaccatacaatatttaggtacaacgtaaaattaatatacatagaagttctagtatttattatttgatgccggctgtattgccttgagcactctgcaatgctcactgcggaaaacaccacatacattgactctcatagtagaaagtaagttccagggaaagaccatgccttattcatgtttttgctcttacagccattacattgcctggcacatgattggagtgtataaatatttttgggttgcattgattcaggttaaatgtcatactttcaaaatcttaattattttctgagaatattttatgatggttagaaccaccagatgataacaaattgaaggcctctggggtagtttaaatacagttcaaaataggtaaattaatgaaaagaaataattgctgtatgtaattatagagaaaacttcaggaaattctgcataattgaaagttgatgatacattgtcttagttcagttgggtaacaaagcatcataaacggagtggcttataaacaacacagatttatttttcacagtttttcacatcgctgggaagtccaagatcaaggtgccggcagattcactgcctggtgaggattcgcatcctcatagaaggcaccttcttgctgcctcctcacatggtggaaggaaaaaaactcctttgactcccttttataaggactccaccctcatgggctaatcatctcccaaagttgccaacttgatacctaataccatcaccttggggatcaaaatttcaatgtatgaatttagggggaacataaacatcagatcatagcaaacataatgatactaattgatatttgtggctacatgccacattttttttactacttctaagttgtacttaggcctattctaaatgtgattgcaataaaactctttaaaaaaatgaatagatgtttgcctctccatccttgtgtttcccgcacagatgctgggtggaatcccatggcaagcatactttcagagggttctctcttcttcctcagccacctatgctcaagtgctgtccttcctggcagctttcgggtgcctggtgatggccatcccagccatactcattggggccattggagcatcaacaggtaaatctcttgcagcttcaccacatgtgccagttagtttaccaatccccacccagacacccttctgtcccactcccctctttcctccacatagtgaattctttctcaccacattcatatctatagatttgttatagcattcagtaaatcgtattatatagttcagcggcctccattttttttttttttttttttttagtagagacggggtttcatcatgttggtcaggctggtctcaaactcctgacctcaggtgatccatctgcctcggtctcccaaagtgctgggattataggtgtgagctactgcgcccagcctccaatttttttgattgctcactccactatgaaacattggtgagcacaccctcctcccagttttggtatatttatccattgtttatatgcactcctgtcagcagtggatctcaaccaaggtgcatgctgacatcatctggggaatggtggggagatcttttaaaaatacggatatgtggcctacttcacaggaattttattttaataactgaagatagagatgggcactagtgttcttttaaaacccctaggtgagttgagagccagagttgagagtcacaggcttagagacgtttacctgtcatcctcatgacctccctaaagatcactttgaacttgagatttctgctttacacctttagtagtttttaattaggggttttctttcttgaagaaagtgatggataagcatttaggtcaagacaaacaaacaaagtcacttagagaataacttattaaaaaatggttttgaaaaaagagcattatgaaatgtttatctccctgttagcctctatgtagaacatgttcaaaagctcacctttaatttaattaaatgtattaattactcctgacctttatgttccggtgctgtaacttttaagagcacttaatgaaaatacatcatgttaatccaaattcaaaggcatcttctacgtagaggtaataaaatagattaaagttcaccttttgtcctgtggtattctgtaaaggtgatccagggtgatgttcctacagcaactttgactttcgattagtagagtcttttattggattgtttaacttttaggagagcagtcctggttcatagtgtacactctccattccagttgttcatccaggagacagacacttcaaaaatgtaaagatgactgacgaaggtggtatgtagtgtttgtctctgaaaaaaaaaaagatagtatttctctcacaagcagaaaacatatatggacgtgtgtgtgtctgtgtgtgtgtgtgtgtgtgtgtctgtgtgtgtgtgtttattgtaggaacacaggctaacagaaacagcattaagcctattttttcttggattagatacacattcttgtttgttatttctgttatcataaaatctcagttaaggccacaaagttgcctgcatgtaagcaggctttggtgacaattgtaatagaaaatgagggaagaaaaaatggtaggatccaaagagaacaattcctatttggtccaatgatcatgatattaaaaaagttcagcaaataaaaagccgactatgctaatgaacatttaaggattccatagttcttcaacacatgctacaactaaccagtaaagaagctatgtattcaaagataaatctgtgtttcaagtcttcttaccctacccacaaccaaaacttcctgaaaatttcagccacatgactgtaatttttattcaataaaaagggactgttcttaacctagtgaaattctatgcaatgtggaaataggagaaaagtaatgctgaggcagcttcaaaaccaagtttatgtacagagagatgatggctgagaatagccctactattgtctttcttcatttacacatgaataactgagccttaaagaagaaacagtgagtgtcccaccacatttccaagtggttgaaggaatactctagaattctgtttatgagagtttgttttctatgattctaggcaatgtaacaccatcattgcagaaaggaaatatatatcttaccaccagtgtctgtgcaggcattgtgaataacactaactataaccaataccttttagaagccaagagatataagacatttccacttgaccagcacatggacttcacaccagactaatgtatatgattctgagtttatttcaaaacaacctagtaaataggatgaccccagatggataaagaacatttggttccttggtggttataatggttgttgattctgttcaacagactggaaccagactgcatatgggcttccagatcccaagactacagaagaggcagacatgattttaccaattgttctgcagtatctctgccctgtgtatatttctttctttggtcttggtgcagtttctgctgctgttatgtcatcagcagattcttccatcttgtcagcaagttccatgtttgcacggaacatctaccagctttccttcagacaaaatgtaagaacagtttctttcaacctgacatttactagcattgctcttgctgcttctgatgttgtatttgttgtatatacagtattatatatttattaatattctatgttaaatctgactgtactttaagcatacgagattaaataacaaattatacctatgctgaatggatgctatcagtacctgttcttattcatgtcaatactaaagggaacaaatcaatataattatttcccaagaggtacagtcacagggctatcatttaacctttttgtctttctgatgaaagagtaatgaaacctaaactattcagcaaaacttttagtataattaaattctctatgacactggaaaatcttggtggaagcagggcatggtaagttgttcgacacgtatttttgtaacttctgaactgttttatacttgcactccaaagtccacctttgcaggaagatatcctctcaatttgattttctttattgaatcaaagtggctgcaaaacagcatgcttcttggttgattaaagcttttcctctctctaggttttagttaacaaaacaatcccagtgtttttgcttttgctttgttttgttttgattttatttgattttttttaattaaccaaaggaactccttgaacaaggcattttctttttgtttttaattttactttaagttctgggatacttgtgcagaacgtgcaggtttgttacataagtgtatgtgtgccatggtggtttgctgcacctattgacccgtcctctaagttccttccttgcaccaccccccacgccccccaacaggtcccagtgtgtgttgctccctccctgtatccatgtgttctcattgttcaactcccacttatgagtgagaccatgtggtgtttggttttctgttcctgtgctagtttgctgaggatgatggcttccaccttcatccatgtctctgcaaaggaatgatcttattcctttttatggccacatagtattccatggtatacatgtgccacattttctttatccagtctatcactgatgggcatttgggttggttccatgactttgttattgtaaatagtgctgcaataaacgtatgtgtgcatgtgtcttttcaagagcaccagaaggtggttagtttaaggatggtagcacttctacaaagagataaactagggatggcctatgctctgtcaatgccacataagaactgttccctaatatgtaaagtgaggaaatcttcccttgctttattatacctccctgacaccatgttagctcatcctgcctttgcccctgtgcattcaggaaaaggctcaggtggcctgtgtgtcatgcatctggtacacagaaacccctcccaaaggtccacccaggaagtcaccttgattgtttgctttgggtgctgtagctgtagttggtttttcccatagattgagccatttgaaccaggagaattctttagaccagttttgaagcaaaaaatatgtctcattctttgcctaaatgagccaagacactgtgcaaaaagctgacactgtggcaatttcttacaggcttcggacaaagaaatcgtttgggttatgcgaatcacagtgtttgtgtttggagcatctgcaacagccatggccttgctgacgaaaactgtgtatgggctctggtacctcagttctgaccttgtttacatcgttatcttcccccagctgctttgtgtactctttgttaagggaaccaacacctatggggccgtggcaggttatgtttctggcctcttcctgagaataactggaggggagccatatctgtatcttcagcccttgatcttctaccctggctattaccctgatgataatggtatatataatcagaaatttccatttaaaacacttgccatggttacatcattcttaaccaacatttgcatctcctatctagccaagtatctatttgaaagtggaaccttgccacctaaattagatgtatttgatgctgttgttgcaagacacagtgaagaaaacatggataagacaattcttgtcaaaaatgaaaatattaaattagatgaacttgcacttgtgaagccacgacagagcatgaccctcagctcaactttcaccaataaagaggccttccttgatgttgattccagtccagaagggtctgggactgaagataatttacagtgaccccatctaaataaaatactgcttttgcaaacagaacactgtaatagggtagttctggagagatggtatgcagcatacaaaaatatattaaaaatataaacaatgttcaggagagtaaaaattcatataaagtgcaattgcacaaatacaagccaagctagaaggaagcacctatgaaagcaacaactttgtttctcatccatagtagtattgattttgatgctagatagttttgctaggtataaaaaataagtaaagttccacttagagaacaaagggccaaatagagtttttatatttgttatgataaaaggaagtagatgtgaaaaagcctaagaaaaaggaaattggacagttttgatacaaactttgtttgctaatgcactgatgagtctagtttcattatagcacgaagctatgagaataacttcagtcactcccttgaatggtgcaatgaattaaccagctgatttttcttagtgtgatgattaaccccttctttcatgttctgagctataacatttgctgaatatgcaatttgttattcttttattaatggcatgtaatattctgagcacgggcaaagaaaacacacaaaagattatgtattggcatttatttatgtgcaaggtgataggaaaactgaatccatctttgtagaagagcactgggctaatttgtatgtttccatagctactatatgcataaacaacagtacctgaaggattattaagcaaccttaaagcaataagttcattaaacagaaggtaataggaagaacagtacatttttgtctttatctcaagtatataaagttttgccccatgataaaataagtaacatataaattaatacataagttaatattggaagtgaaattaggccttatgtaaggagaggtagctacacagcatctgttacggttaatgagaggcacactgctaaatttacgtatatttcattgaatactttatgggaagcctccacaacacctcctgatagtagtaaaattagaaaaaaacaaactctactaatttttagatattcattaataggaaagatttaatgttacagcatctactctttggcactttttcacataagccagccttagagactagacaaataactactgcaaaaagtacatagtgaattttaaaatgtagaagaaagcaaaaaataaaataagtcctaaagtgaagaagccatcaattttaacatttgatgtctagataacattcatgagattggtcattaaatactattttgctccttttctggtgttacacatacacactcatacgtgtgtgtgtgtgtatgtgtgtgtgtgtatgtgtaatgatttgtgtccatttcaagtgttttcacaccagtcacacattatagaaattactggagccatgtctacaaaagcaaagtgaagtgatgagctgaaaagtgatcagggaatctgatcccataaagaaagtgagtctgaattgttgaaactaaagcacttcttttccaaaaatacttctgcaactcatgaacaaaatgaagttaacttagtgtttagcattaaaaataaaagttgtaccttgaccctagaattccttttataagatttaattgtaattgtctcaaagcatcaaataatacatctttatcattaaacatgaatttaatgtctaggataatttttaaaagaggaaattaaataattttacatgtctcatattttcagtgctttctcaaaatttgatggtgaatattacattgcattcaaaatcttcactgaatatcatatgtatctaaatgaaaagagaattacttatattcatctattttctcagaatctattcagtaccctatggagtacatggaagaagtatatttttggaaccagtaagtatgggagtccacgattctcaggtattgattgaaaaaagagaaaggggcaagaaattcattaaagaaaaaccacagatactgaaacatttgacacataaaagtaattaattgctggagactacaattcctggcaaacaccattattccagatgcaccatgctacccagcatgctacctgaatggcggtttttatccatcctgtcaccctgagcatctgtctcaacctgctgaggcacagacttccaccatgtgcatcaggaaacacctcactcatactgtcatataatgcaacagggaggcatagtctctctacaggtctctctctttacgttgtaccattctgttgggcaacaattgtcccaacaaccacacttaaatccagtggggaaaaaaaggttaacagtaaaaatttcttccacgtaattcaatttctcacaatagacagaaacagggggaaaatgtttgccctgttcaaagtactaaaactagataacttaaataatttaagccaataaataatattatattgtatttaacccattattcctcacctaccctcaaagtaggtatacaaaagactagtttgttattaatccacaaatatgctaaatgttagcaagatgatttttaagtacaaaaaagtttaagattgcaaggaaggaaacaatggtcacaaggtctttacttatgcacatttgtgcataaatttccacccaatttccaagacagttgtatcacaaagctgtgaaatgtgcaagagtatactttgtacccatcatgtgctctgttttgacataatgagtaatgcagacatttacatgttcttccagcttcaatcagtagacctgattttcaaaatctgccctcagatgaaaataaaataaacgaaacatttagacaatggctatattaatctgggaaggcaacacctgtggataaaacattagaagaaaacatatattttattttcatacttttgatatgattgtaacatatttcttgagtaatttaaatgctttgttttcccacacatattcaaatcagcaagcttgtagctggactgcaatatcaacaacaagttgtttcaaacagcatcaaaatacaacttcattgctacacttacaagtaatgaattttatgtgactatgaaacgaatataagcttaaaataagtgaatctaataaaatggctattcctctttttacttggaaataataaattaacattatattttaaacataaattatgatttctttttctgttttagccttcatgtaaatttacactggtatgatgtgtaatttattgtacgtttgctacttcatagacagatgcatataatggttctagaacatatatttttgtctgtcaaattattatataaaattatgcttaaaataagtatatttgcaactgtgtaaatgctttaagtgtaatggcaatgtattaaattgtgctggtcaatttagggtatcattgtctaaatttggcttttgggggccctctcttaaactaagtatatatggtgcttcaagacaattatgcaatgaaatcaaaataaaccatctcattactggaggataggcaaatgccaagtggaaatgctgcacctcacgtaagtcttggggcaatatatatcatagctcaaaaacaaatgtaaattgtttttcttggaaaagacattctaccattgtacacaggtcttttgtaaatcaaagaaatcaatagaataatatccattaagagtctcatgcttactgactgagtcagccaggtgattccaattatattcgttccaatcacataaagaagatctgcatttttcaaaccaaacagctgaccaacagttgttgtatgaagtcaatctctaagtgacaagtggctgtcattgtgctccaactatgtgctctgtatctctcatcttactctctcaagatgtctttagacatgtagttatatacattctcagaagaactttggcctttcataccttaattataataagcattagtgcctttggatgtatatagggcagaagggcctataatgagtgtagggacgaatgaaggaaagaataagtaggtatgccagggcaacatcacatcgagttgtcgtcttgtggacacacttctggagattatacatttttgctttatcacaaatctatagtgtggggggaattattaagagccagaaaagagactgtatcagaatataatattagggcccgtggacgttatcttcattttaaccattgtatctagagagcttaaatttgatcattaacattctcctagaacagacattcttgagagagatccagaaagctatgggataatgataattatggtttctccaatttttatactgtcacctcaagaaaagttacaaaacagtaaaaacagtcattgtatcttatttaaattctctaaagtcagagaatatgtggtgattctgcctttatttttggttggaaaactatagttatctatttaaaagagatattgcattatgtattttgaagccaaactgctgtgttgatttatcagtttgtcatatagaggcagttaaaagcataaaccaggtaagactaaaagtccagtgatagaatttagagcagtaggtattactgaaagaagtaattgaaaacagcttctgatagtgcagtgccacacgtggagctgaagagaatacagtagaaggatggggccaggaatcacgctcttttgggttctgaaaatggacggagctgggagaattattgaaactctctggatctcttttatttttgtaagtcttctttttttttttttttttattatactctaagttttagggtacatgtgcacattgtgcaggttagttacatatgtatacatgtgccatgctggtgcgctgcacccactaatgtgtcatctagcattaggtatattatttagataacctttaagatcttttatatctctagatttttcattacgcccttattaggaaactttttcggagaattgtagcgtaacttgttggacagtagttgagagtgggactatagaacaagacacacatggctttgaaaagcagctcagcatcagattgagggccacaagagttgcatggtcttagccaagtcacttaacctctgtaggcctcagtttcccagatgtagatggtatttacttgctattagtacattatatgatgcatacaagctttcctgaaactgtctttccaactgggaaaactgtgacaaaatttatctagcttttgggaaatcattttgactttgaatcttgtattcaactagttatcagcatggattctatgataaggatgaagaaaaagggatatgttttaaaatatattgacctataggtcatatttggtttatttggctcttcaatgacctcattcaacacaaattttatgctgtgctgcatgcacccaagttgtgctccatacattaccattggtttaactagacgtggctaagtccatggtacagtttacctcagcatttatattggaatttttgggcaataccacttatcaagagtactttgtgcccagagtaaacaacagaaagagaaaggccatggcagttttgcgggcttgggaaagtctgaaaaatttctttagcttagttgccatgtgtttttctgatcatttccttagaagataccacatgattgaaataatttttaaagaagtaataacaacgataggatattcaaaattattttttcaatgtgtaaatcatccaaagttggccttcaaagttcataaatgtgtatgttgagggtgaattgggggtgggaaatacatgctaatgggttccaataaaaattaacatgaaatttgaaaacatcaaggtcgagaaagtattgcaaaccacactactctatgtaggttaaaatgtcccaggcatagatgatagccatgggcacaaaacgtaagctaggacttaagtgcaaggaacaatttgggttgaacccatgcagagcaattgctgtctcaaacccatttgtttgtgttcacagcgtttgaacttacacaatgaacgccacatgttctggtttctgttcatcaacattaagtccaaatttatcctgaagaaaaaaactaacctacatagtgttctattttataataacttcctttttacattttcatttgtatagcaaaatttccattaaataataacatacatagtaaatatttcccacatttcattttccagagagaactacaaagtcccagaaaaataaatttttaaaactgaagattttaaaacataatataaaataaaaagagctgattatgactttgtacacatttggtgcaggctcctgtatcacagttatttagaggggctaaaaaaaaatccttaaaagtaattttagttcactccatatcctaattaataaaagactttttaaacaaaatctgaagtagaagcaagttttcagcattcatattggtggcctgttagagtctactttggagattcttctttcttattttcatcatctgctgaccctaggtgttaggagatgttgccttcagtcctggctttcctcctaactgtttggtcttggatgacttaattgacctttcatcatctcaaatcatgttctataaatgatataaatttctataaaggctctttaaggcctctttctgtcttgaaatttaatcctatgttggtctacacctcccctccatgtcagatcagatgtaatttattacttacactaacgctattcgaattaccccaagatctcatgtcctatcctctccctcattgccactgccagctggttagtgatatcaacttctctagtgaattatccattttctctttctaggaaataggggggacacaatatttttatcaaggaaaataacacacatttgccccctccaagtcctattttcttaccatcagaaatgctctatttgtgaattcagcccatcttgtggtattaacaacatacgatcgagtctcactataaatatacccttcactttgtccaggtagttggtaaaagcctaaggtattgaacaactccgagttacccagcaggcagccccttggaatcactggactattctagtagcctctgaaattctgcctcctactctatgttgagccttctaagacccataaaccgccccccaaaactggttattttttatatgagtttcatccacttatttgtgtattattcaacaaatgtttattgaacaccatctactcaggaggcttggacagaagaactgtgtgagcccagcgagctatgatcatgccactgcactctagcctgggcaacaaagacccaagaaaaccctccaaaaaacaaaatggacttgagagattaatgaaagttgattctccagtagattcagaaggttgatttcagggatttaaacctattatattgtgagcccactcacaggcatgagagagctggggggagctgacttggggagaagttattaatttgcttttttatatactcaattgagctttttacacagtttccaggagggggaatatagtatgcattagaaaatgtatttcacatgcttggagctattctagattaagtttttattcaggaatgagtctttaatctagatcattggttctcagtcctggatatacactagaaacaactgagaagcttttgaaaagtattgggtccctcttagaccaattgactcggaatctctggaattagggactagcatcggtatttttcaaaaagtttctcaaattattctaatatgtagccaaggttaagaaaaattgatttagagtctgtatctctgggatataaagaactcataatcactaatctgatgcctagacaggaaatgaaagcatagcttcccctttctttacttgtctgagagatgacttctgagcattacagatttcatctaacaagaagaataaacattgaacaatgaagcctaagggttaaaaatgttgtgaaagggagtgtatggggcatgtatgagtgcctaaaaaggggaacaaatctaatctgtgcatttgggcaagtacatcctcagttgtttaatacgtgaaatgatgaagtgccattcatctaataagtaaacattaaatctctgctcagattgtttccaaataccattttccattaaagaatatcaggactccctatagggaatggctgattccagtctgtggcaaggaatgttaagaggagcctggaatatatttgcataatagatagcaaagaaactaccaatgatcactgagatcacgtaaaaaggcaactgagccagagagtgggccatttgccctatgagagtctctctcatcctcctacccctgcccttttccctaagcaaccagggaagtgcaactgtatctacccatgggccacactcacagggcagccaggggaaatctttcctcccccacctagcagcaccaggtgtagaacacacacttgagacgcacaggtggcacttacagtgatgaagcagaagacccagctgcaccaattaagtatagccagacagaacagtgctgcaacaactaaaaactgaattgccattggatccacagctcatagaagtaggccagggctaaactctaaacccaaaccaggtgactacctgctaaaatataaaataaaaataaaacccagagactgcaaacatactattcaagttatccagaatatcatttaaaaaaaatcagtcataccaaaagccaggaaaatcacaacttgaacgagaaaaggtaaatcaacaaaggccaataggctgacgagtaagatgtagaaattatatgacaagggttttaaagcagtcatcctaaaatggctcccacaagcaaacccaaatgttctggaaacaaatgaaaagcatgagaacatgaaatgcctgcaaagaaataaaaggtactaaaacgaccaaatgggcaacatagaactaaaattaaaataatcaaaacaaaaactcactggttgagctcaatagcagaatgaatatgacagaaaaaagaatcagcaaacttgaagataaaacaatagaaattactgaaactgcataacagagaaaaatggacagaaaaaggattaaacagagtatcagagacacatttgatgataacaacagatctggcacttatatcactggagcatagatggagagaagaaaaagagtgagttgcaaatgtattcacataaatattacgttggtgcaaaagttattgcagtttttcacattacttttagcctaataataactgaaattttcctaaacgtgacaaaagatataaacctaaagtttcaaaagttgaacaaattcccaacaggataaactattcactacctacatgggaactccaatccaaatagcagttgatttctcacctggaggcatggaggccagaagaaaatgacactacatgtttcaagtgctagaaaaaaaaatcaggtgtcaaccttgacccatatacctggagaatattctttactaatgatgaggaaataaaaacattctcaaatgaagtgttcttcatttgattgtttaaagcaaaaattgtaagtcatccaataaagtgcccaccatgtgtagagggaatagtttaagaaaactacatatttaatacgtggagggtaaggggttctaaatagaggtaagttttctacctatttcactctatgtcataaaatgtcaacacctgcgtactgatgaaatccatatgtatattgtttgttgttttgctttttgggttttttttttttttttgagacaaggtctcactcaagttgcccatgctggggtgcagtggtttcattactcttcattgtagcctcaacctccagggctcaagcgattctcctacctcagcctcctgagtatctgtgaccacaggtctgtgccaccatgcctggataactttttttttttttttttgtagagacaaatctcgctgtgttgcccagtctggtctcaaactcctgggctcaagccatcctcctgccttggcctcccaaagctctggaatcacactcatgaggtatatgtatattataacacctagaacaccacttagaaaactgtacaaattgatgtactcaagaacaccataagcaagtcaaaaaataactctaaaaatgttcaagtgacccacaagtgaacacaggcactgaaatagttaaagcagtcttgacgaagaataccctggagggaaatgctggtgagaaacttgtgatgaatctgttctgtatcttgactgttactggtggttatagaaatttatatatgtgatctaattgcatagaactctggggaaccagcttccctggagagagttcttataagagacctagtgttctaagatgccacatagcatgataattagctctgtaaccatgtttccagttatttgatctgatctgaaagtataataaagcttatctcattcccctgagactgtcaaatgaccacagcccagcaagggctctaatgtacactcaagcgtgtcagggagactggagtgttaccttcctacacacttatattttgggagatataaagttccagaaatctgaggcacctctaggtcagaaaagccaaggcacaccagtatatctgaattttagagagattttatttaaatactaaagggttgaaattaggacctatacccattacgtttccaaggagactcaagagttgaggagcacagcttcctccttctcctctataaacaaagcaagatctttttttttttctcatccatcatccatggagcatccagcacacaggaacactgtgttccagaaaccacctccatgcctttcttcaagtgaaacagccattcactgccactgatacagctgcttattgcaataattgtgtctcctgccttctgatagttgagcatctccacctggactctactgttttggtgtcctatcaaccttactgcttactagtgggctcttgctaccatcctccttgtcaaacaaagaaaatcatcactaaatttcttaatggtgctggtaactctctcaccagcacactctttatagttgtgatcctctgaaccttccgtgaaacaccatatagtgctcttccagcacgatttggcatgtccactccagcaagccctctactctgagtgttttggccccttccttcattgtctgacatgacaattctggtgtcttcaacttcattgagctgggccaaaacattttcatgtttctaggagctgtcctagcagtgagtatacatcatcttcaggagtctttgccaaggtgtaacaccctgtatcccaggagagtgcttccatcactggagaggctgctgccacactgcaccataaggatggagtggacaagatcccagccagtccatcatcagcctcttcagtgctgacatggtgtcgggctactaatttttcaaaattttccactcttcttcccaagagtttcatcagacgaatagccacactgccacttggacactttgagctcccattatccaagtcatcccaggcaggaagaggaatcaccatcctaactggggtttctgaccctggtcatcagaaggaggtgggtttgctgttactcagtgggaacagagataaatacatttggaaccaaagtgattcctttaatgtctttggtactcgcttgcttacttgtgaaaacacatgggcagatgcaacacaccagcctgaaaaggatgtggcagtctccttagaccccctcagggatgagagtctgggtacctcacaaagttttccaccaaagccagcagagttgctagctgaggatgaagcgaatttataatggacagcagagaaggaaaacaatgagtattagttttgaccctgatacttggttcagtgatggggactttcctcttctaagtctacccccaggaagaggtccactgggaccctgaaggaggtcacttaaagctatgaccatttagactcctaagtaattcttgcctagtccctctttccaagtgtcctccagttcacattggagcataccagtcaaggatacacaccaccttgagtcagcttactcaaatattaaacagttcctactattcaacatagttcctgcatattgactttattgaataaaatctgcatttcccataaactttaaataaaaattttatttacatacaaagtgcaaattatatcttccttttccataattctggttaaaaaaaaaaaagttccagcaattgcatttttactatttacccaaagagacaattatattccactccacatattcctttcaaattatctgaccaggatttctttgcaaacctgtcttgcctacttttccttaggttgaaaggattctgtaatctcaagtctgcctcaaccctgtatcttcatccagtaccccggatcagtaggatgaaagtggtaagcctacaaaaaagtccacttccatttgtgtcaaaacctactttcccaatacttgggcatgtcaattctgctaatgttctagagtacaactttctcacattttctaaaaccatattttagaaatggttacaaaatccaaacaattaacaaaataaattagaatgatgaaaacaaattagaggaatgcttttaactttccaggtaaaaggcattgcttatccaagactgactactgtcctcacccatatagttatagaattcnnnnnnnnnnnnnnnnnnnnnnnnnnnnnnnnnnnnnnnnnnnnnnnnnnnnnnnnnnnnnnnnnnnnnnnnnnnnnnnnnnnnnnnnnnnnnnnnnnnnctctaccaattaaaaaaaaaaattatctgggccgagtggcatgtgcctatggtaccagctactcaggaggctgaggcaagagaatcccttgagcccagaagttcaaggcagcagtgacctacgatcacgccactacactccagcccaggtgacacagcgagaccctgtctcaaaatacaacaaggctggtcacggtggctcacacctgtaatcccagcactttgggaggccaaggcaggtggatcacctgaggtcaggagtttgagaccagcctgaccaacatgatgaaaccctgtctctactaaaactacaaaaaaattagccgggcatggtggtgggcatttgtaatcccgctacttgggagactgaggcagtagaatcacttgaacccgggaggcagaggttacagtgagccgagatcgcaccactgcactccagcatgggcgacaagagcaaaacttggtctcaaaaacaacaacaacaacaaaaaatacatgccacccccacagcaccacattcaaactccccccagcccaacccacacacaaaaggaatacaggaaaatattaagtcgttatttctgggtaataagattatgggcaatttataagaattaagacggagaccatttcctctgaaacatataacttaccaacatcgtatctagccaaatcttcaagctctggttcttgtacatcaatgtttccaatatcatcgctaccaagaaaagatgtatccttaggtgactgactagaaaacagagcatcatataatgcagactgcccgcttttgttggcaaaagtttcaacaaccacttttaaaaaatcttgcttgccacgacttaagtttagcaacatgtgccctgaaaaaaaaatttaagttatttccatcactttaaaaatacagattgtatttgctcacgttgtctcatttgtatacccaaaggggaaataatatgattattgcagacctaaccctccaacccaaaaaatacagctggacaacaaaacgggtgcttatgtagcaaatgaaaagagtacaggtttaatattctcagtatctacataagacagcagaagggggaaaaaagacaggaatgtgtatgaaaaatgccaaacgtatttgcattttagatgaaaaggtctggatttaagtggccataggagaacagggacaagctcttattctctgatctgatacactgatttctaaacctggctcatcagaatcctcctttaaacagcttttaagaattatttccagctgggcatggtggctcatgcttgtaatcccagcactttgggaggccaagctgggtggataatgaggtcaggagatcaagaccatcctggctaacacagtgaaactccatctctactaaaaatacacacacaaaaaaaattagccggccctggtggcgggtgcctgtagtcccagctactggggaggctgagggaggagaatggtgtgaacccgggaggcggagcttgcagtgagccgagatcacgccactgcactccagcccgggcgacagagtaagactgtctcaggaaaaaaaaaaaaaaaagaattatttccaggccttgttcccagagatttttatgccataggtttacagtaagcaatcaaaaaatcatagtcctcggataaagtactgatacatgctataacacagatgaaccttgaaaaccttgctaaatgaaagaagccagtcacaaaagaccacatactatatgattccatttatgtgaaatgttcagaagaggcaaacctacagagacagattagcggttgccaaggctgagaggtttgggtaaaatggggagtaactgctaataggtaaggaattcctcatggagtgatgaaaatcttctaaaactgactgtggtgacagtgataatactctatgaacatagtaaaagccactgaactgtacactttaaatgggtgaagcgtatggtatacgaattatatttcaattgaactttttaaaaaaaccctccttcgagttaattctgctgggcaattaggtttggttaccactacacagttgtgtctcagcacacttacagaggcaccctcgggatgcccagatcaaagacataaaaaaaaatacaggcaatttttatctaactgtgacaccacgcaaaggcacttatgagagccctgcaagggtagaaggaaaagagaaaaggaaaaaagtagaaagtcactttaaggactgaaagcctaactcccacaaaaaaagtgggctatggaataaaagagcaatgtgagctttggccaacagcctaactatacaccaaagcttataataactttgattaatattacatcttgctctttacaaaattcatccaattttatatcagaactgctccttatagaaagcattatgtttcttcagttcactgcttgattcaatggccatctaactaccttaaagtttgtatcttagcaaaatcacaggtaatacgcaacagacctttaggattcatcccaagccaaaaatgggggaaaaaatccacaaattccaagagcctaatataaggtaagtatatatcttctatcttcctcactatgctctcagttctttaagacagatgcgtatcttcttcatctttatatccccacagcagtgtttttagaatcagctggtgttaaatggttggcaaatcaataattatacttagttcaggaagtgactaaatattcaggatagaggctctagcagccagatgaagaaagagttaagaaatcctctccacataggaacaaacaatatcaaatattcatttttttaaaagaatgtgctatttcttcgcatctcttccatacctattgctcttaactgatacggcgaaaagaaataattttgacaaattatctcctggacagatggagattttatcataagatatgccttaacagaaattcctttttctttttaaattaaattagtttaatattactattacctgattggctcagtcggtcacaggccatcatttccagcagattttgtccagcttcaccttttattaatttaatctttggtcttggaacctaataattttagaatcaaaaatcttaatttgatgatacccatacttctaatagtaacatggtcttatctattacactgtactttttttgataatgaatgaacagttaaccattaattaaactgaattggaaaagactgcaaaaactgggaaccaaggaatttatataacctatgaaagataggccaggtacaggcgtggtggctcacacctgtaatcccaacactctgtctgggaggccaaggtgggctgatcacttgaggtcaggagttcgagaccagcctggccaacatggtgaaacccagtctctactaaaaataaaaaaaaaaaacaaagagccaggcgtggtggcacacacctgttaattccagctacacaggaggctgaggcacaaggatagcttgaacctgggaggcagaggttgtagtgcgccgagactgtgccattgcactccggcctgggtgaaagagcgagactccatcgcaaaaaaaaaaaaaaaaaagagaggggccagacatgttggctcacacctgtaatcccagcactttgggaggccaaggtggggggatcacttgagcccagagttcaagaccagcctgaacaacacggtgagaccctatctctaaaaaaagttttttttaattagccaggcatggtggcacacacctgtggtcccagctactcaggaggctgaggcaggaggatcacttaaatccaggaggtcaaggctgcagtgagccatgatcatgccactgtgctccagcttgggcgacagagtgagaccctatctccaacaaaagaaaaaaaaaaaaaagcatacacagagcagctctgagaaattagtttctactaaaagcacattcatgttacattcagagaaatggaaaatttaattacattacttttctaccctgcataaataggacaacagcagatgttgtcctatttgagtagatatgacaccctactttaaaaagtacaggtgaaatgacacttggaaatgccacattgtagataacacattttcagagtatggataataggggatagcactggaataaatgggacaaccaggaaattaaagagatcctcatgcaataacctatggaaaaaaaaaagcatgatgaatagaatggcgaagggaagacgtgacagctgccttcaaatattaaaattattttataaaagaaatcatcaaaagaagaaacaagaccaacaggtagaaggcttgaagaatatttttattctatataaggaagtaccaagagccaaaccacctaaagatgcactgggctatcttgaaaagtaatgaatgtccatcactgaaaacgtccagtcataggcaatgcccacttactagaaacatgccaaaagtaactatatgggtgactagagcatcggcttttaattctatcaccactttcttaattggtggtggaaatgtaatttgatacaacctctttagggttagatatttggcaacagctctaaaaattataaatgcacagatatactttgatactgcaattctttcaggaattcatggcacaagttaatcattgctaaattacttgaagtagcatttaaaaaaaaaagtaaaagcaagctaatgtcctggctttaggaccctggttttaaaaactccaaaactacagtacatccatacaatggaataatatgcaagcatccaaactaatgagaataccctttatatatactgacatggaaacatctccaagatacagttaatggaaataaagtaaatgcaatgttcaaacgttttcctccttcttttaaagacaggggatatatgtgtgtttacttggagatgcataaaacatttcctgaagaacacacaagaaagcaataacattagtttctttgggggtggagaaagtaaataactagggaacagaaaggagtcttcatagcatattcttaagagcctccagaattttaaaccatgtatatataattctttccaaatatgctcatttttcaaaatatatgatttatgaacctaaaagcttctgattttgaattttagaaatattcgtatcgcctatccttttactcacaagttttctaaacatcatgtcaaagtttgtcatctatatgttgaaaagagcacacaaaataagaaacaaaatgttgacatcattctttttgttttcaaactgacctcaattcataaacccggcctcttttacaaaattattcaacagttgaatttgtgaccagttaattagttgtgaatccactcaatcaaatcatctcaattcactatttcctttttttttttttttgagatggagtctcgctctgttgccaggctgcagtgctgcagtgctgcagtggcacgatctcggctcactgcaacctccgcctcctggtttcaagcaattctcctgtctcggcctctcaagtagctgggactacaggcacccgccaccatgcgtggctaatttttctatttttagtagagatggggtttgaccatgttggtcaggatggtctcaaactcctgacctcaagtgatccgcccgcctcagcctcccaaagtgctaagattataggcgtgagccaccacgcctagctatttcctcatcttaactaaaaggtttcaagatactttgtcaactacctagctgcaatgcagatgtacttactagaaccacagtattcctctgattaagagtctgaaaatcttgccataaaagttagccaattcttacatacccaaatgccagcacataacctacattttatgcttataatcatttgatcattaagctttaaaataaactgataaaataaaatacaagcatctaagatgtttctattatatattcattctacagaaatatgtggtagttaataaagactgaggtaggtatctctgtgctgaagtggaacaatgaagaaacatttagaaaagcaaggcatctggcaataggtaaagcacacccacattgaggcacaatattttttaaaagcagagaaagaatgtattgcacatttgcatatgcaaaaaatatttctgaacacccaagaaactcctaacagtagctgtcatctaggaaaggagacctgagtgaatggattaagagggaaactaacttattatgattaaaagttcacagtcaggtgtggtggctcatacctgtaatctcagcactttgggagggcaaggcagaaggatcacttgaagccaggagttcaagaccaaccagcctgggaaacatagcaagaccttgtctttacaaaaaatttaacaatgtagccaggcatggtggcaggcacctgtagtcccagctaccgagctgaggctgaagcaggagaggatcacctgagcccaggagttcgaggatgcagtgagctatgatcatgccactgcactccagccacagcacctcccaaaactacatatcaaaaaattgtaggctgtgcgcagtagctcacacctataatcccagcactctgggaagctcgagcccagttcaatgttacggtgagctacgattacgcaactgcactccagcctgggtgacacagcaagactctaatagacacacagacagataaattttaaagtttccattaaaaataagaactattggcagggcgcggtggctcacgcctgtaatgccagcactttgggaggccaagatcatgaggtcaggagatcgagaccatcctggctaacacggtgaaaccccatctctactgaaaatacaaaaaaattagccaggcgtggtggtgggtgcctgtagtcccagctactcgggaggctgaggcaggagaatggcgtgaacccaggaggcggagcttgcagtgagccgaggtcgtgccactgtgctccagcctgggcgacagagtgagactccgtctcaaaaaaaaaaataaaataaataaaaataagaactatcagttacttgagaatttctataagaaccttttaatgtttgtattacctagtgaacctcactaaatccattaattttcactaatccattccttatgaacacagaagtttctactgagcaaatattagcacttaacatgtgaactgtctatcaacggtgtttttaaaagatttacaggccgggctcaatggctcatgcctgtaatcccagcacttcgagaggccgagtcaggtggatcacgaggtcagaagatcgagaccatcctggctaacatggtgaaaccccatctctattaaaaaatacaaaagattagccaggcatggtggtgtgtgcctgtaatcccagatacgtgacagactgaagcaggagaatcacttgaacccaggagacacaggttgcagtgagctgagattgcgccactgcactccagcctggtgacagagcgagactccgtctcaaataaaaataaaaagatttatattaggcagggcatggtggctcactgcctgtaatcccagcactttgagaggccgagacgcgcagatcacctgagttcaggagctcaagaccagcctgaccaacatggagaaaccttgtctctactaaaaatacaaaattagatgggcgtggtggcgtgtgcctgtaatcccagctactcgggaggctgaagcaggacaatcgcttgaacccgggaggcggaggttgcagtgagccagatggcgccattgcactccagcctgggcaacaagagcaaaactccgtctcaaaaagaaaaaaagatttatattaggaggggccttctctaaaagtaatgaatccttttttttccctccctaagcaaaaaatccttctctaaaattaatcatttttctaagcctggtttaatgcttttttggaagactgcttatttcttttcctttcaaaagttatgcaggctcattaaaaaaaaaaaaaaaaaaaggctgggcatggtggctcacgcctgtaaatcccagcactctgggaggctgaggcaggtggatgactaggtctggagattgagaccatcctggctaacatggtgaaacccgtctctactaaaagtacaaaaaaaaaattagccaggtgtggtggcgggtgcctgtagtccagctactcaggaggctgaggcaggaaaatggcgtgaactcgggaggtggagcttgcagtgagccgagatcgtgccactgtactccagcctggcaacagagcgacactcgtctcaaaaaaaaaaaaaaaaaaaaaaagtctcttttggccaggtgtggtggctcacacctgaaatctcagcactttgggaagccaaggtgggtggatcacttgagtccaggagttcaagatcagcctaggtaacatggcaaaacctcgtctctaccaaaaacaaacaaacaaaaatcagccggatgtggtggtacacacctgtagtcccagctacttgggaggctgaggcaggagaatcacctgagaccgggaggcagagattgcagagaactgagactatgccaaggcactccagcctgggcgacagagcaagactctctctctctcaaaaaagaaaaaacaaaaagcctcctttaaaaaatgcagtttgatgctataaatttatcagttaatagtttttggggcaaaaaatgttttctgacatttcaataagagctatagacgaagtccagcattagtcatgactctggactaagtctggaaatctggaatctcttcccagctctgggaggtacaaagttttaaaaaataaggtcaaaatgctggaaaacattcaatttatttccttattaacacaattgttcactcataaacgacagtaacacttggtgctatgggtcatgcactgaggtcagaacaaggaacagaagaaaatgaggtaaattggtaaatctttttgcaggctgagaagtgagagaatgctggcatgcctactctgtgctgggtttttttttttttttttttttttgagatggggtcttgctctatcgcccaggctggagtgcagtggcgcaatctcggctcactgcaagctccacctcctgggttcacgccattcttctgctcttctgcctcagcctcccaagtagctgggactacaggcatccgccaccatgcctggctgattttttgtatttttagtagagacggggtttcaccgtgttagccaggatgctcccgatctcctgaccttgtgatacgcccaccttggcctcccaaagtgctgggattacaggcgtgagccaccgcgcccagccctctgtgctgggttttatgtcgtccaataactcacaactatgtaatttatttcctttttacagataaagaaatgggggctcagagcagtcaagaacatgccccaagttattcgtcagtgaggcggaaattgtggtgtccttgtgtaagttcacagtttatactttaccattatactgtgctccaaattatctgatatttactttcaaagcatgtgtagaaagtttactatgatgatgcagagacattgtacagaatccagtcccttgactctcaggtccccagaacactcacttcacgattttgttgacctcttctgtcaacttaaacctggcactctcttggctggctttctctgctctttctgggcactccaaagcttctgtacttacatgctacaattccagtcacaggaagatgctgagttctttagtcccagatccatattcctgagaaaacctaattgcctaggctcaggtcataactctgtatctgtttcagttgattatggctgggcctactgcccctctgtatggtggtggggcaaaagttcccagagagaggcaggggtgacaggttgtctcaaatgctaggcagacatctggagtggtaaccactacatctgttcacagtgagcacatccttgcagggaaactgggttaatcatctatattattgaaactcagaggtatagtgtttcttcataggaattttctttctttatttgagatgggggtctcactttgttgcccaggctggagtgcagtggtgtgtgatcttggctcactgcagcctcccctcccgagttcaagcgattctcctacctcagcctgctgagtagctgggactacaggcatgggccaacatgcctggctaatttttgtatttttcgtagagacaagttttcaccatattggccaggctggtcttggactcctgacctcaggtgatctgcccaccctggcctccctaagtgccgggatgacaggtgtgaaccatcgcacccagactatttataggaattttctgtaggtatataagtaataatttgaaggtcacaactagatgccttttcgtgtaaccgtatcttgaatggaacaaacattttctttctacgtaattatacataaataactcaatgctttttaatacccatgaaaagccattagctcaaagacacttgcaaacttgtatcaggttgttttccttggtgtgtattaagtttgaagcaaaggggattttcacataccaagacgaagcagaagtcttccaccaagttgaaatcatcacgttgcaatttaatcatgtgatacaaccaattttttgatgtgttatgccattcgccaaataccaaaaattttttaggggaaactttacatcctcaatactatacacttccagctacaccaccacctaacagggactttaaaaagaatacaaagtacggtatgccttctcagtgccttgttagtaattcagttacagttctgctgaactttctttaaaggaatacaattctcaatcttacactgttcagagcacaagcatagcttattgtatacaagagatgtgcatcagttcccactcctcagggactgtatgaatttggctttatttttatttatttttttgacggagtctcactctgtcaccaggctggagtgcagtagtgtgatctcagctcactggactctgccacccgggttcaagtgattctcctgcctcagcctcccaagtagctgggactacaggtgcacaccaccatgcccagctgattttttgtgtgtttttagtagagacggggtttcaccatgttggccaggatggtctcgatctcttgacctcatgatctacccgctttggcctcccaaggtgctgggattacaggcatgagccactgtgctgggccaaatttggttcttagaaaccaaggagtgatgtgtgcaccaggcccagggctgaagagctgcttctcactagatgcctctcttggtctggctgctgtgtccagtcctatccagggttagctctgttcctccttcttgcggcatctgtgtttctctttctgctctgcctctccccatctcctagtccaaacatccaaagaaattaattacctccaggagatcgagaccatcctggctaacacggtgaaaccccgtctctactaaaaatacaaaaaattagccgggcatggtggcgggcgcctgtagtcccagctacttaggaggctgaggcaggagaatggcgtgaacctgggaggcagagcttgcagtgacccgaaatcgcgccattgcactcacgcctgggcgacagagcaagactctgtctcaaaaaaaaaaaaaaaaaaattaatgacctctgcccctaactgaacaaagcccttcatctaaggccaccctttggttggcagccttagccagacatctgcttctggtcaaatcaatgtcttgtccacagggaggcccagcgctgtttctggttttagctggatgcagggtgtcagacatggcaggtactacggtctacgtggcgggtatcaaagagttggtcgacgttctcacaacaacctaatagggaccaaccatggaaggccagtagtaaaggagtttgaagttccctttcagaaaccaattaacaaccccaaagagacagtgtgtaacataaaagagctgccataaaaatatacagttaaacatatttaatagaaatattaaaataatcattacacttcctctcattgcagaaaccatgaaagaatatgccttttgtaatcaattttttatcatgcaaaaaagtattttgttatgacatttgtaagtggagactatatttcaaaacaagtttatacagacttcaaaaggtctcaagtcaaagagaaagtgaaatatatttaaatatgattagttacatctaatgcagctggcatactcatattcacagtttataaagtaaaaaaactaaactcttcatgtcggctctgaaatagatgcattttcattcatacattcgctagttaggtctgttcttctaaggaggaaagacgagacatatgagatattttttaaagaacaaactcaacatatcagcagcaaatttcagttaaactaaattggaaaccaatgttctgtgtaaccaaagtgcaaagtcagttccccagctcagaaagaaaattaagagtataaactgaaggcttaagagaacttcagagagcatactatgtgattaatacataaatattaaaaattatccaatttttgatttaagaacaacacagtttggatctagtcattaaaacatatgcagaggtgtcaaaggcaagtaacactaccacctaaggttattcagaggaactgtgaagatgtagcacggacctctaaggtgtctaaaatcccttctgatggaaagcttatggaacactatctgccaaaaacactgaaagcaccacttttatatttagatccaatgctgagtgatatagtcactgttgggataggtttttatttgggaaaatggagaggattctcaaaacagattcatggcttgcatgcagtgacaccctatcaagagcctggaaagacaccatgaaatcacctcaactcaagtggtgggcccacctactcatagtcagtgttacattagccagctctagggctctgacaacataatgagttttgagatagtatactttaaagaaaaaaagaagagtttattttaaagcaaataactaaactgtattttaacttagcacaattaactgcagcatatttacttcatagccccttaacatgtcacttttaccaacaaagctttttccttcatattctaatcacaaaaatttctcaacaatttataacaatctgtaaatctgaccttgcaataaatagtcataaaatgttatttttattactattattatttttagagacaaggtctcgctctgttccccgagctggagtgcagtggtacaatcacagctcactagcctcaaacgattctccagcctcagcctcccaaagtagtgggatttcaggcatgaatcaccacacctggccttgaaacattatttttaaagcctaaattccagttggtatggtaccaaaatttagtttaacttcaaaattcacagtactgccgagaaatgggcgggtcctgaggttccagagaagtggggagtgaattcattccctggtggttttattctggcagcatgcatgggagatcacatgagttagagggctgtggcctggtatcaatacttcaagctgttgtacttttacttcaagttgaaacttttaaaatacatctgtcatatagatgtacaaatatatgtaaatgcaaacatatacacactttttgacaaaagaatgatggtaatacacatgaaccatttttgtaaatagattttatttggttaataaaaatattccttccatcaacctatcgaagtccaaaccaactacgaagataggatgcccatccagaagaacgggaagcattttattcctcacctttggaaagtaaaacaaaaaaaaaagaaaaaagagagtattaaaatttctcaatgtaaaatctatattttagaaccactctacaatataagcaaataatgtcttttttactgatcacatgccttttttgttggggggggggggttctttttttttttttttttttttttttgagacagggtcttgctctgtcacccaggctggagtgcagtggcgtgatgagacttcagtgcagccttgatctcccaggctcaagtgattctcccacctcagcctcccaagcaactgggaccacaaggtgtgtgccaccatgcctgggtaattttttgtttttttgtagagatgcaggtctcactgttttccaggctggtctcaaattcctgggctcaagtgatcctcccacttcagccttacagtgttgggattacagtcacgagccactgtacccaaccatatgtcattctttagacacactgcttactaaatttctctttttaaaggatatactgaatttccggttgagccaacttaacagctaattttctattttagctttaaaacattgataagcaacatgaagcaatctagaacttaacctttaaatggctttattaaagcaatccagctatgaaaattatgcagaaatgattatctacaatcttaccagcacataagaaattcttcctctattctgaaataccatcttctcacaatatactttgatgttatgaatcaatgtctgttcttgaacattatttattgtctttctctattaaacaattccaaaataaaatttccagcacaactaaatattgttgatgataagaggattttaaaaaaaattcttttaaaacagaagcttatatacaacttagaatctaaaaccaatagatttatggtaaaccttaaaactgaaccaaaacaaacaaaaaccaaagttttaatcatttaaaaatcatgtttattgaggtacaacttacttatagtaaaacctgcccttttcagcgtatagcactgagtcttgacaaatgcacagttacgtaccaccaccgaccaaggcctggcacattttcacctcctcaaagttctccctggctgcttctcccactccttggcaaccgctaacctgttttctgtccttatagttctgcttttttcagtgtcatataagtagaatcacactgtacatagtattttgagtctgacctctgtcaactggcataatgcatttgagaattatccatgttgctgtactggcagtgcattcttttttattgctgagcagtattcaattgcatggctgtaccagtttgtttattcatttgccagttgaaggataactgagatcttcctcgtttttagcaattttaaagaaagtttctacgaataattgtgtacaggtttttaattaaatgttttggagatataattcatataccacataattcacctttttaaagtgcataattcactggtttttaatatattcacaaggtttgtgcataggattttgtgtgaatactggttttcattcctcttggataaagatttaatttggcattacccttccagacaccattctgtgttttcatacgtatatatgtatgacagtctgaccttaggcagagtagcattttcaaaattttacatggggaaactttctagagttaaagtcattttatttttctgttctgtctggttttatctgcgtgttatttacaatctgctgcgtaacaaattactacaaacttagtaccttaacacatatttatttcacagtttctgtgggtcaggagatcagaaatggttctatttcaaggtctctcacagggctgcaatcaagatgttggcatggctggggtctcatctgaaggctggactggagaatctacttccaaacttatgtggtagttggaagagtttagttcctcaaggctgctaaactgatggcctgtgttccttgcctctgggatggtagcttgcttcaacaaagtgtgcaagcagagaagacagagagagtccactagcaagatagaagccacaatctcttgtaatctatcatttttgctgtattctactggttaaaaataactcattaggttagcctactggctctgaaggggaagagattatacaaaggcatgaatttctggaggagggaatgagggcaaagaactctgaaaagtctctcttccacaatctgaagaacttctagaaagtagaaggaagcgatattgcttagggatggacaacttggcactggttatgtgttccaagtgaggtaaccttgttcccaggaataaagagaaccagatgactgtaaacatttccctaaactgaaatgcactgttgtatgttcacctgcaatgaatggtgtaagctgaatataagatttttgacaaaataaaaattttgctgtgttctcagatctggcaggctcctgcccttgtgcaaacaatgttcctggtaactattcatctccttaggtaaataagaattggagaaaagctgtgcttagatagggtgcatttgctcttgccttggaaggttgttttctgataaggttctatatcctctgcaaatcaaatcaggcacttacagtgtgagtatgcattctcttcctgccagtctggagatgatcaaaaagcctataacaggcttggcctattttcctattgggttgctgggctttttttctttatttacttgtagagagttttagacctctgtgtatgtatggtgtacaagtgacaatattcagatctgtaaactgtaacccagtctgggagcaaagaagatatagaaaaatgacttttacttccggcttgagtagtaaaattgagattcaaattttgcatatagaagtactatatggctaacttatttggggagcaaagctgacttaccataagtctatctcaaatagaaatgaaacactcaatttgtgaaatatgctgagttttaatgcgtgtgggggcagggtgaattaacatttgtgatgcaaggagaagagcaatctatacttaccactgtctatttgacattgtttggggactactgctacactctaagtcattttaccttataacgcagagttgtaacacgctactctgagcagctcatgacatctgcttgaaatttaagttgggcccctagtatgtgtttattataaagattttgatgctgcttttcagagttgggtaacctactttaccccctaagctaatgtttcccaaatacacccaaacccacagaaaggaaaactattcatcattaactcacagccaacatcataaacattttatatctagagctgatgatacagtcaggtatttaccaacactcatgtatatatgtagagtgtcaagaaataattgcttatccttactagattcaacattagccttactagattcaacatattctaatgtttcacatattatttttatttcttaattttttttaaagatggggttttactctgttgcccaggctgaaatgcagtggcgtgaccaggatttcgaccagaagttcgactgcagcctcgaactccttataacaaagaatcctgctgccttagcctcccgagtagctaggactatgggcacatgccaccagaactggcatattttaaaatttttgtagacatagggtctcgccatgttgcccaggctgattctgaactcctgttctcaagcaatcctcctgcctggtcttctcaaactgttgggcttacaggtgtgagtcactgagcccagcttgtattcttttgattttaaaaaaatattctgaatgtgatccaccaaattaatttcaccatccactaataggtagcaacctgaatgaaaaatactattataaactttacacaaaaccagagattataaacatttgcttccaaggagatgagagaggtaaaaggtacttgtttgctctgatgggccctgtttccttcagtgccaggaagagtggctctcagacctttcttctagcatccctcatgtatgcagtgttggttattattttcaaggccttggtaacaaaatgcccccctagtgtgaccagtcagactgacagtccatatctgtaatatggtggtaagtttcctttgcatgtctttctttctggcatcttagaccttttacctaggaaattttctttttgcttgaagtacatcattaagaattttcagtgaaggcagattcttaaagtttttgttttccagaagagatcttggaaaatataaaaggttggcagttatttcttttagtacatgagatagtattacaccaatgctgttgagaagtctattgtgaggcaatgtgtcttctttctctggctgcttttgagatttctgtctgtcttttttaggggcagttttactcttatgtgactagaagtagatttcttctttttttttttaatactgcttgagattttattgggtttttgaatctgtggatagatatccttcaacagttctgaaagatttccagccattctcttcatatattatctgtgctgtattcttgtctctccttttagaacttcgattagtaaaaacatgtttgatgtcttttcccactcttgttttttgtttctcccatgctgaattctgtgtaatttcttttgaactatcttgtagtttacttttttttttttttttgagataagagttttgatcttgttgctcgggctggagtgcaatggcaccatctcggctcactgcaacctctgcctcctgggttcaagcagttctcctacctcagcctcccaagtagctgggattacaggcatgcaccaccacgcccagctaatttttgtattctgagtagagacggggtttcaccatgttggccaggctggtcttgaactcctgacctcaggtgatctaccctcctcagcctcccaaagtgctggattacaggtgtgagccaccgtgccaggccttacattctctctcttaaagagagaatgtaaggtatctaaatctgctgctaaaccatcattgtttttaattgtaataaggtctcttttatgtactcacattgataagagacaagtagtaaataatctttaaagggcaaactaatttaaatgtgttttcctgtctgtttacaggacttaccaaatgcacatcttagagttctgggtttccaatgtgtatctcctctatgaaattctttaaaaatatctgttcttggtatcccttaggttagtctcttttagaacttctaaatcaatggacccttaacttataggagccacctggacattagcaacatctacattaaacatgctgagcttttaaaagagggctgttagacatgctcagtattttgagataatatcattgttgtattgaaaactattgaaaactttaattttaaaatgcaaacgttcttaaagtcctggttaattttataactataaaattagttataattttgagatttctgtcttgttttttataggggcagttttactcttaggtgactagaagtagatttcttcttttttataactataaaattaggtttacttttgttagaataaattaaagacagtgaatttgtaatctgaataactactaaaaatatacatgatgtattcttatttgggcccttgtgacaaaaatactattgtggctatagaaacctatcctgtagtttgaagaactgagattactgtcagtattgagaacattcctccttcatcattagaaagattataaaaaaccagattcaaagaaactatcaatactacttatgaagtatgtctgtaaaaaaaattaagcctgaatcttatcaggcctctagaccaggggttttcaaggtatgggccccagaccagaagtatcagcaacaaattgctaaaaatgcagaatcttgggtcagaaattggggaccagcaattggaattttagtaagtataccagatgattcagatgcctgctcaattttgaggatgactcttatcagtttagttattagggtttacaggggatggggaacatgttaaagaacaccaactagataaggtcaatcagtcaaaagtaagatgtctggacattctgggcctcctgatgtcttagaaagcacacaataccatctatgatgtatttttgtccaccatcccacctaattgcacctggatcttcctatttataggcaattggaacaagctcagtgttaccctgtaatgattaaaacccaaatatagaactgctatagcataaatgaccactttcttcaattaataagtggcacattaaaaatatatttatatatataattgttatagataaaaaaacaacaaaatggccgggcgtggtgtctcacacctgtaatcccagcactttgggaggccaaggtgggcagatcacaaggtcaggagattgagaccatcctggccaacatggtgaaacctcgtctctactaaaaatagaaaaattagctggcgtgcatctgtagtcccagctacttgggaggccgaggcaggagaatcgcttgaatccgggaggcggaggttgcagtgagccatgatcggaccactgcactccagccagggtgacagagcaacactacatctcaaacaaacaaaaacacaacaacaaaataaagcttaaggaacatcaaccaaatgcaatatatgagccctatttaggatactataaaaagacattcacaataacacaggcaaaatgaacataaactaggtataggtgacagagaaattcaataaacattgaattattcactggggaaagaaatgatgtgtgggatttaagtctctaactctcccctatttatgccaaaagattgtccatgagttgaaaactgttagagatgggtgacaactcaagagagattatagcgccttccttgtgcttgtaaatgtcaaaaataaaagtaatttaaaactaaaacaaaaatgaaaccataattcttaagatacagcttgaattcagttaactatagcagttgtatatgaagcatttcaaagaagttaatgacatcacagtattaaatccatctgacatggaaaccaactctaactacatcatagttttttgtttttgttttttttttttttgagatggagtctcgctctgccgtcaggctggagtacagtggtgtgacagatcactgcaacctccgcctcgtgagttcaagtgactctcctgcctcagcctcctgagtagctgggactacaggcgcatgccaccacgtccagctaatttttgtatttttagtagagacgagatttcaccatgttggccaggatggtctcagtatcttgatcttgtgatccgcctgcctcggcctcccaaagtggtgggattataggcatgaaccaccagcgcctggcctatggcacagttttaaaactgcatttgcctagaaagtggactgctgtatatagaccaagtgttgggctatatgactccattgtcttaggctatttggggttggaggaaggaagaggggtgaagtagaaaaggaacaagctaataaatgttttttaaaaagtagaatttaaaacaaaaccacgttcagctgaacaccagaacgcaacaccaggataaaaatccaattttcaaagagctagaagatcaagctaagcacttattgtattttgctgaacgttaaaattatataaatgtactacagttgccccaagatgttaaaaagtcagcttttcaaatctagtcacggcctactcatatgacagacccaattcaaatgagcaaaattgaaaagttacacatacagacaacttctcaaccaccaggctgtttagtttaagttagaagtcagaagttctgagactctccttttacccaccttgagcaaccgcagcaagttttcccttttcttcagggctgagctgcaacatcgtatttataacaggaagaagtctctctctttcactacctggcttcaagaaaatgaactgcagcaagacgttcttcaagtgttccacgttagctgcagactcctcttgctcttgattcctttccaatcttcttatttcacttttgagaagctggtgttagagaaatgagttaaaaatgggctttaggagcttctgattaaatatggcagactgaactcatgtatttttcttctcttccccccaaatttcccccttccctccatatggcaataaaggaaggaattcagttaactacagcagctgcatgtgaagcatttcaaaggagtttatgacatcaccgtataaaatccatttgacatgaaaaccggaactccaactatgagatagtttcaaagctgcatttgcctagaaagtggattgctgcatatgaaccaagtgttgggctataggactccactgtcctaagctatttgggttggaaggaagaggggtgaagtagaaaggcaacaagctaatacaagaggagaaaaagtagatgagacacatcaagaaattctcacgagaaacagatgaagaggtggaaatgagtcagtccagcagcttaccaagtatcactgacaagaggagaggatgcatcctgtgtaaatactggagttcttgtctcagaagcacagggtatcatggaaattggagttgaaagctggggaactgatggaacgtctccatgaggagcaaataactggagccatgggttggtaccaagatgttccctctgccttctactttcgatagaaactaagccagtatggcatggggctctgaaaatgggctgaggggaacattggtagcctccactaaccccctgcccctacgctgttcctgaagtcccaggcagttaagacgtccacagtgaacggcacttaatcaaaagttcagacacagtgaaaattcaggaatataagacaatgtaaaacactatcagagaaatgaggcaaagaatgatataaaaaaggtaatatcatgttcaagtctttgaggaagatttccaggttgaaaccaagccatagcttttagtatattttcattttaggttaggcaagaaagttagcgaactttgtcctcaaacctaggaccatttaaaaaagtgacaataaagaagacgaagaaatcatgaagagagtataaatttatgaaaatataacatttggccaggcgtggtggctcatgcctgtaatcccaacactttgggaggctgaggcaggcagatcacgaggtcaggagattcagaccatcctggccaacatggtgaaaccatgcctctagtaaaataaaaaaaattagccgggcatggtggtgcgtgcctgcagtctcagctactcgggaggctgaggcaggggaatcgcttgaacctgggaggcggagattgcagtgagctgagattgcaccactgcactccaaacctagtgacagagcgagactatctcaaaaaaaaaaagaaaatataacatttaaataagtcatttaggtttactgggctagttagtgatttgttagctatgataatgtttttattagtgggaaaatgttattttatagagatgcatactgaagtatttaatggtggaatgtcatgatatatacaatttactgaaaataactgaattcggctttaaaataatctgacaaggatagctagtggccttgcacagtggcaggacagatctattaggagcagcaaagtacaggggaaaagcatgtacttttcagacagctatgagtttgaattttgttccaccatttaccagcttcaatttttctcttaaccagtgatgagattaaataatgtatgtagagcccagggcctgggtcataagaactcctcaacaagcagtatgactatattctgaggggtgatttatcagtgagccagggtggaaatacctcatttgagtaatcctcaactgttctgcaacattcctagatgtttctggtgtctactttaaacaggaaaaacttcccatgccactttgccatctccacctgaaaactgtttagtagttcagtactataaatatcagttgaataatttaaattcactggttatctttagaattcaaagactcacacccattttttatttaagcatatgtgaacaatgatttgtgaacatctctctagtttctaaatctattacggtttcttaggaaaagtaggaattaagaaataatctttatgtaataggtgtaaaagaagtattttggctggatgcagtggctcacgcctgtaataccagcactttgggaggccaaggcaggtggatcatgaggtcaggagatcgagaccatcctggataacatggtaaaacctgtctctactaaaaatacaaagaaattagccaggcatgttggcgggcacctgtagtcccagctacttgggaggctgaggcaggagaatggcgtgaacctgggaggtggagcttgtagtgagccgggatcgtgccactgcactccagcctgcgtgacaaagcaagactgtctcaaaaaaaaaaaaaaaaaaaaaaaaggcaatatttctcaccatcaggaatctaatataaagatcaagacgttatagatgcatctgcaatgtgaatttttaaacttgggtacatgtgtatggagggtccagaaaaccaaattggcagttttcatggtggccaggttttctgatctcaccttaatttgctccataaggactgcactggttgcctctgcttcccgaagcaggccgtttaagtgatctgcactttttgtggtggaactgagcttctgaaccaattcttctttggtaaattcagcatgccataatggaggctctgcaacatgttgttccaagaattaattttcaaaatcatacattacagatgaagattctaaataagaaaaatctaaatataaatatcttactatgtgatattttataggtctgctttctttgccattcatctattcggcatacctcaatcaacagattatatgttgtaggtgacacaaataaaacagtatctctgttgtaaagcatgtcatctaactgaatacaagccctatgagtcccagttctgaaatttgtcagaattgtgtttatagacagttttattacacatcttcttcccatctattaatattccaagattttatgtcatttcacgtataaggaaagcattaacatttactggtcacgtatcatgttccctcataagaatcttctatcaggcggggtaggtatcattattcaaactttacagacgatgaaacaggctcacagttgacaggtaatttttgcagaaatcacaaagtcaaattggcttctggagtctgctgctctatcatgatgcctccatgtcaccactattaactttgcctgaaggaaccatgacttgctgtttctaccccacgtggtcagtgaccatgaatacaaatgacccttactccaggtgattctgaagtttcaggaagatgacagattccccctaaattttgaacagtaatattaattacaggtaataaaatataccaaaacatcactacaaaaatttagcattacttcatcaagaggaataaactgaaactgtcagtttcttggaagggtgagaggatagtttatcctgctttctaatacccaccacctatttgtgactataaacttcccaccacttatttatggttcaagcctagggcaagagctagcattttattttaaaaaagatttgtttaataatttttccatttggacagtgtgatggttaatactgggtgtcaacttgattggattaaaggatgcaaagtattaatcctgagtgttgtctgtgagggtgttgccaaaggagattaacatttgagtcagtgggctggggaaggcagacccacccttaacctggtaggtgccatctaatcagctgccagtgaatataaagcaggcagaaaaacctgaaaaggcgagactggcctagcctcccaacctacatctttctcctgtgctggatgcttcctgcccttgaacatcagactcctagttcttcagttttggaacttggactggctctcgttgctcctcagtctgcagatggcctagtgatcgtgtaaggtaatacttaataagcatccatccatccatctcatccatccatccaaccatccaattagctctgtccctctagagaaccctaatgcaaacaggtagtggaatattgaaagaaattttattggagcagcccaaaaaagcatatgtaccttagagtaatagtaattaaataagacagtgaaattaaagaagaacatatttagacagagtaacagaccaagtttagtttcgggagaattaagcagctgctctaaagactgtgtgtatgtgctggcggaagacacagactccgtatcagttgtcccatgccttctccctcttcccgggttacagtgtgcatgtctagaagtgggaggtctgtgtttctcctttctcgaaggttcttcaaagattgttgagaggaaactgggcctattagattttttttaaaggttaagtgtgagattgttcaaaatctattgattcggccttacagaggtacacaataaaatgaaaatatcaaatgataagagtagaggaattaagtaactataagataagtgaaaggtgtatgaggaattgctaaaacatttcttaaaatttagtcatcaaggccgggcgtggtggctcaaatctgtaatcctagcagtttgggaggctaaggtgggtggatcacgaggtcagcaagttcaagaccagcctggccaagatggtgaaaccctatctctactaaaaatgcaaaaattagccaggcacggtggcaggtgcctgtaatcccagctgctggggaggctgaggcagagaattgctggaagccaggaggcggaggttgtagtgagccaagatcacgccactgcacttcagcctggcgacagagcgagattccagctcaaaacaaaaaaacaaacaaaaaaaaccttagtcatcaaacttttaactacgttagtcattttaatagcagctataaattaattgctactagctaagataaactgttagataacacagctcataatatagtactacttattttttattaatttagagtagagggccaaactactgctaaatactggccaaaattaaaagactagattctagcaatttttcaggattaggtatttcagattgctgcatacttcttgaaacacacttgctgaaatctgcttggtagacatcctcaatcactgcccttatacctttacctctgcagcttcttaattgttgctgctcacacctacagtgctcatacagttaagagcccagaatccagggcacggaactaatcaattacattgcctagcaagactttcctgtttgctgataaactgtaaagtgttattttttctgagacagggtctcactctgtcacacaggttggagtgcagtggcacgatcttggctcacagcaacctctgcctcccaggctcaagccatcctcccacctcagccccacaagtagctgggacttccaggtgcatgccatcccgcccagataatttttgtacttttaatagagatgggatttcaccatgttgttcagactggtctcaaactcctggcctcatgtgatccacccgccttggcctcccaaagtgctgagattgcaggggtgagacaccacacctggtctaaactgtaaagtttaccaggccctttgacatgtattggtttattgactcccaaaaatctgaagttcagagaaatttaatgactttgcccaaggtctcataactgagttagaaaccagaattgtaatctagatttttaaacttcagatttcatttattttgcatttcattaaattgccttagtcctgactgccctttctgaagcattttcctgggtttctggtaagctgactgcttattccactgctgattgctagattacaatctcttgtgcgacctttgccctggctgattacttcctttgttgattctttggcatatactaaattcttctgaagttgcttttttaccctaataagtgaccgatagctgctaatgctccagtgacaatatttcccatgggaaaccaaaacaccatcaacttgctactaaaatactgcatcatcatggctgacatttttccatttcttcctggaagcagaatggaagatactgggtacggctgaactaaaactccaactaattgtaaatgtgaaagcaaagaagctatattggttatgcagttctacacattcagtgccacttgagtgtttctaagttccttgctctagctaatgtttctatttaaaaagtagacaaatttgatgactaacaacggagaacaagaaacaaatctggtgaataccagaattaggacatgtgtcagccaggcgcagtggctcatgcctgtaatcccagcactttgggaggccgaggcgggtggatcacgaggtcaggagaccgagactatctgagggagaatcttcaggttttttcttctcttttgctgtaacaccagtcaaaaaaattgacaaagatgaggtattaagtattgacgttaatactctacctgaaaataaaaaccatggaacctatctataggttaaaacagcatactgataaaaaacacatatactttgatgcagagatgtacgataatcatgaattagaattagcatcctgatttagtgttctaccaaaaaccctaagtgaacacagaatctatttaaaaccaaagaaaacaaaaaaatcttgtgtttacttaatagtcattgaaaagaattactacaaatttctagaatttaaaaaggttaaaaattttaaagtgttgcctaactatacttagcatacaatagtttaccaaaatatccatgcatttgcagcaattgaaaaaaatcttaaaacataagcaagtattagtatacatatgaaactaatccaaagccaactgtgattagttcctgtaaggaaagttaacaattgccaagaatggaaggtgactagagttgcatctagtttgcctgtgttcaagcatgatactagataaaattaaataaaaactgttactctatgggtagctaacactataaaatctaagaccattcatatggctgaaaacaacccatccccagccaccattaatgcaaagcgcaaaaaattagaaacagaaaaaacttctatatgcaacctgttctgatctactaatgtaaagaagaacttctggctaaaggagtttaataaagtaagccagtcatgaagcatgccatgtataccaactggtgacagggaaacattctgagagctatggtgtccaatatggtagcctagccacattctattaaaacctcacaaggtggctagtccaaatcaagacatgctaacagtaagtgtaaacacacacactggattttgaagacttggtgaaaaacaataatgtaaaatatcattaatttttgtattaattagaagttaaaatgatattctggacataatgagttaaatcaaatctatcgataaagttactttcatctgtttccctttttaactgtttctttttattctttttaatatggctactagaaaatttatttagttatgtatttatttgagatgcggtcttcctttgtcacccagagctggagtgcagtgatgtgatcatagttcactgaagcctggaacttgtgggctcaagtgatccctctgcctcagcctcccaagtaactgggattataggcacaagccattgcaccaaatgacaattttaaattacatacacaggtaatattttatttctattggatgacactgctctgcagaaccagtgcccttccttttacaatgttaaatctgtccctctccttcattataaacaaaaacttagtatcatttcctagctaggagaaataacagtacaccgtaagatacagattcttgttccacttctgctattactcagtaaagaccccttgggtaaatcagatagcctctcttggccacagtttactcatgtctaaagtcttcatttctaaggtcccttgggacaatgacattatcagattcaaaacagaataaggctctatgttctacagtagtgtataggcacattcgttcttaggtcagggattcctaacctagagctcacagaaactgtacgcaagtatacattcacttttaagttaacacttttcacatttctcaaagaccgtatctttaaaataaaagattaagagctaccttagctggtaataaaactggtatacttaaaaaaaaaaatcagagattgttactttatcattgtacttgtttggcatggctaagatgtgttactggtcactaagggtgagatttcacttccctaacctgttcttgaaggccttcaacagatcccacttcttgttccactctagtagccacacttctaaaattgatcggtgcaacatatataatatgcaagctgtagaatgctggctgttaaaaacggggtccattttcaaatacaacatttttctaaaccatgcacaaaagaacagccctacagggacactcttccatactgtatacatgccgttgccactacatgtgaatactggcagacgttagtggctaaacataaacattagataaaacataggtcttcattgagcagacctgaaatagcagagcaatgaagtacattacaaatcagcatcccagtacattttaaaaaacaaaccaacaagggtgtcatgccaccagtcaaaaggtactttgcttaaactggcattctttaacatgcatgttgtagtggtaagtacttcatttcatacagccacagttattaatactttgctaagggctacccagctgctaaaaactgctgttatctcatactgagaatgctagttctatacctttgctctcaggctgtgaggaaggggtgctagtccaaaaggccatgggattagatttaaaaaggctaaaattaaatcctagaaaataaagaatatttcattttttaacattttaggaaacaaaatgaatatgcttttaaaacataaaaagccagaatccctcaatttataccaccaatctgtcttacatattcatttatccctgtagtttcattctttgctcctttaatacatgagcaagactgacatacaacacataaaatgagaacatctcaatatcatattttttttttttttttttttttttttggagacaaagtctcagtcactcagtcaggctggagtgcagtggcatgatttcagctcactgctacctccatctcctgtgctcaagcgatcctcctgcctcaacctcctgagtagctgctaattataggcacgcaccaccacgcccggctcatttttgtattttcagtagaaacagggtttcaccatgctggccaggctggtctcgaactcctgagctcaagtgatctgcccacctcaacctcccaaagtgctggcattctaggagtgagccaccgtgcccagcctcaatatcatgttttctgagtgacaaaagaaacagaacaaatgaaaatgaacactttaaaaaaagactcacgttaatgcgcatgattcaagcatgagtccgtacactgtaccaagttcttttgctctgccctagcatgatagaagtatcttccagttactgaaatgtctttaactaagttctcttgctctttgaaacctcaccgtgaacttattaagggagaaaaaaaattgctcaaatattttgggggtgttcacaaagcatcgtttatatcccaacattagtatcccacaaagagtctgcatcaagctaaacattaaaagaaagaaaaattgtgcttaactttaacaacaaagtacctacccttttctggtgttttaaatgtgtagttgattgaagattcttccattggaaaggaagcagagagatttttgactttgctatctgaagactgttcgatatcagagttctttgacagttcacattttttaggttccactttgctttcagatccactctgggctactgaactagtttcactgttgttacttttcaaagatgcattaaaactaaatccaaacaaagacccagtggcagaactgttgccaaatgcaaatggttttgatttttcactactaaaaattcttttaacagactctgaaccaaatacaaactttggaggagaaaccactgcttttgttgttgtttcagatgtgctagacacttcaacttctgaagctgcatctgctacatcatcaccctgaataacatctgtcctctctcttgtggtttcttctaatacagctacagcaattttgccacatggtgactctctgggagtgcttgaccgagaaacatgaggtgttatcaaagaatctttttcctgggctgtttttgcttcatcaaaaattttcttaaacgagtctgcaacatcctgtagtttaaaacgaacagctaaatgctctacttttctttctccatctgcaaaatcacatgcagtccacacccatactctttctgtccctttcatattttgcaaactcatgtctggagttattgtgtgattggcacaaagttttaatacttggtcccttctcatcactatacgaacttgcttattatcataattctgtaaaatctttatatcaccaatgcccctttctttccattgaccaacatctttatcatatctgtagagttctgccctgtgactaaaaacaactttttcattttcctcaccactggatacttcaactagatcaggtaaaggaacaacaggttcaaagtactgtccatctctctcttcttcttgagtaacatcagattcttcatcagtgccaactgaagtcccactctgattcaacttggcaggagacttagatggactcaaagcagatttaaaactgaagttagatcctgttgttgactcaccaaaatggaaaagattttttctcacagggctacttgccaatggagaagcatgtactgagctactactgacactatcatccaaagcatcttcccttaaatcacagttatcccattctaatgtgggcccagtgttttcaggattgggttttattgttgtgtctgaggcaccggccgcacctgtacctgaacccttattttcttcctcagtgacttttgtttgatcatttgtcaaaaatgttttgaaatctttcagtccactcttcatttcttcagctctctgtattaacttggcagctctgccagtatctacaagtttatggggagtttgaagtggtatgtctaacagaagctgctggcattcctcaaatttctgcttgaattcttcagccagctctggtgttttaaattttgctgctaaccgctctagtttggcatcaccatcagagaaatcactggctgaccacatccatgctctatctgatccagacaggggcttcaggttcattgtagtcgttatccaatgattagcacacacttttagtacttgttctcttcgcatcagcattcttggtttgccattgacctcgtttttgagaatttttaagttccccaagcccctttctttccactgccttacctcagcatcaaatctaaatagttttaccccctgtgaatacagaactttttcaccttcttctcctattacaagttctactttttcaggcatttgaactactggttcaaaatggatgtcatcgctgtcctcagtcttataggcatcatcatctttctcaaagtcaccggaagtgtttgctttattggccattttaccgcattgtgatgagaataatttttctccagcacctgaaaatcccttgaaattggggtcttttttgccaaactgaaatccttctcctgaagttgattttgcaacatctgcaaatgtaaaagtgctacttgtttggccaaaaatcacaccacggccattcttctggccactaatatcctgagcctggaagccagtatcattttcaagaggcttttcactttccttttcttgatttcctggttccgaaatgccaaatttaaatccatcagcagacacagggatggaaaatccttctttggttgacttaaattctgtattagaagaaccctgaaacataaatgaaggtgaattttcttgatccacatgcccaaaatagtcatgaaataaataccttcttcattcctaaacaatttatcaaatgatgttaacaataatgatgatgatgatgatgataacatttattgagcatttattaatgtgccagctgggcactgttctaagcactttacattattatctcattttaatatcctcaaaaaccctatgaattaaggtattattattatcctcattttacatatgaggcaactgatgcattgagaggttaagaaacttgcctgtggtcaaaataagcagaagagcaagggtctaaatgcaccccaacactctatcctcaaagctgtcacattcaactaccactgtaatattgagtcttcaatcaattgttatatatatagctgtatcaggcctgaaagtacttaccacatagtgggtcagcaagggcattacagttctatttctgttaaaacagaacgatgaaggatccaccaccaccactcccatttttaaaatattctaaatattcacacttattaactcaaaaataaggtgactaagaaggataatttctgtatttggagataaatttaaaatatctacattttaagggacataaaagttttaatagtgaactgctctcttgaatttatttgaaggaaccctaaacaatttaaaaaggaaataattataaatgtataaattattcctttgttacctttgtgggagtaacattagctgctggtctgagaagatactgggaattatatgctggtgactgactataatatactgaagggccagtagttgcaactaaaaaaaaaaaaagaaaagaaagaaaacactgttaaagtctatactacagttaagactatctagtcaagagctacaaatacaaaagcaatagaaattaaagaaagatttaactacataaattttaaatttctgtacatcaaaatacaccaatcaagattatcaaatgacaaactagaaaaaaactgctaaatatgacatgaagaataagagaatagcatcgctgtgatcaacaagaactacctcacaagcattaaaaaaggaataaagaagaaagtaactgttgccttttctaagaaagatcagtatgatgtggaattatggacattcagtcacagaaaggacgtaaggaaccaagatgccatctgatggtcaatgcatttgaagtgggcctagaaaatctgcagaaagactaggttgtattttgtaaactaaagctattactgagaatgttcagctcaaaaatcacctgacaaattcatggaaaggatgtcataaataacataaaatgtgttccctggcttaaaataaaaagcacatcaacactcatacagatgtacaaactgtctgctccctctgtttggtctgttttaccaggaaacaaaacaactagaaggcacccctgttaatgacaaaactaccaatagtcatttgcttcaactgttttatgatagttttaccagaaaacaaccaaaagatctttcatgcctgtacatggaagaagaaacagaaactgtgccaagaggttccaaacaattgcctctggaaagcactgaaaaatcaagacccagaaaaggctagccagaagcccaagtttgattttggaaaccttacagaggtgaggatagctattttgaaattactatggggaggaagcaggcacagaacacagaacaacctgacagaaatggcccaagaatcttaaagtcttgcaagatgtctgtctgcatgaaagcaaaaagaaaaaaataaaatattaaataaaaaaaaaatcttagtctgaagtttaagtagggactttaattgactactgactctaaactgtgcggctctaataaatctactaaaagtaatctaacttttaaaagcaccatatgaatagacaatttaggaaagaaatgttaataggcctcaaggaacatgtttttgaagtgagccttgaaaatctgcaaaatgacgaggttgcattgtgcaaattgaagctattatgagaatgttcaggtcaaaaaaattacctgacaaattcatgcacaggatctcacaaggaacacaaatgtgttcgttggctttaaaaaaatcacattaacattcatgttgatatacaaaaactcttctccatctgttttgtgtgagttttaccaagaaaccaaacaactggaaggtacccacgttgaagatggcaaaactaccaactgccatttgcatgaattggtgagcatgactagtattaaaaaaacttaaaaattgatatcacttttgttcctacaaattggcaaaggattttataaactagtaagtcagcattagcaaaagtgcgaaaatggcactatcagatactagtggtaagagcataaactgaatattttgaataccctacaaaactaggacagtgtcctagaatttgtaatggcataaaccagaaacaacataaataaaggaacagaatttacagtacttccatgtgatgggataccatgaactcattaatattcaaaaaacatttaagtttaaaaatgctcagaactaaagtaacatttaaaaaacaggctagctcatctacacacaacatagtaacatggtaacaatctcataaaaaatactatatgtatagagaaagaaccagaaggaaatgctctcaaatataagaaatgttaataaggtggttagtttttagttttcttcaccctgttcagtacttctgagtatctcctatgagctcattaatctttaattttaatcatcttatttttaaaaaacaaggaccatcttgatatatgtttacttttattaaggaaaaagaatctatgaacacaggaacagaaatcaggagatcttggctctcgccctttcagtgccacaaagctgttttgtgaacctgtaaataatccatttggagtctccatgtttctcaattgtaaaatgacgatgtgctgcttctacacatttcacagggtcattgcaagaataaaatgagacaatgagaatgttggatttacatgcttgtataagaacagaagaccttttatgcctgtacacagaagaaatggaaatcatgacccaaaaggcaccaaataactgactgcacacatcactaaaaaagccccaggaaaggctagccggtttgtttatcctcttacaaggacctatatgatgtgtaaggttttaagaaaacaaggtttgaacgttagacatttcatatacttatctatgacttacgacatttaataagcttgacttcacaaagattttctgttattttgcttgtgttgagaagatactatcacaaaaggctagtggggttgccttaactatatggaccatcacacaaatgtgctcatctaaaccagattttattctaaatctttcctgggctaaaaagagagagagaaaaaaaagggcactactactaccatttcagaagtctgtcgtacataaaaggaacaattttgttatttctggctgcctgggagcaatgtattatactggcaagtgctttggagttacaccactggagtgtgaatctcggctctatcaataactagctgtataataatgagtaagttacctaacctttctttatccatttccttatttataaaaaagggattaataatggtaccggccattctaagttactgtaattaaataaaattacattcacaaagcacttttgcacatagccaacccacagtaaacactattagtaaccttagttcattaactgtttactgtatactctaataaatgtctgatacacacccatgcccacctgcacatacacaaatgctcatagtaattatgtaaggcaagtattatctccacatttcaggcaggttaacttacacagctattatagtaagtgatagagcagaacttaaaaacccagtatgattcaggtccaaactccttttctttctttatataaccataatatttcaaattaagtaagatttcctatataacgtcctgcctctcatcattatcatcaaaataattccccagaggtgtaggttcttaattaagcatttcttagtgcataactctattcaataacatttttcaatttaaggaataatctcatctcagctcatctgaggtgtggattaagtgttctttaagcctttatatacacgtgatcacatacggctcgttttttctgcttgggattataaaaatctccgtaacaccaaatacagcttttgaagtcacatataaacagacgttgacatgtatattaacaaacatatataaacaaggtgatttcacacgttatctacttaaaagagggaagtaaagtagttttactaaaatatgcgattatccacttgccagctcacctgttagtggagccccatgaaatgtctgtgacccctgatatccatcaggcaccgagtctggtccataattctctgtgggccaacgatgatgggatgctgacttactgctatttagtttcaactcctgcatttcttcctattggaagaaaaaaaaatcaaataattttaatcatttaattatatcatgccagaaacagtgctggggaaacttactcttttaaatttaaataactgattttttctttttttcttttttgagatggtgtctcgatctgtcgtccaggctggagtgcaatggcacaatcttggctcaccgcaacctccacctcctgggctcaagcaattctcccacctcagcttcccaactagctgggattacaggtgtcagccagcacgccaggctaattttttgtataatagtagagatgcggtttcaccatgtttgccaggctagtcttgaactcctgacctcaagtgatccaccacctcagcctcccaaagtgctgggattataggtgtgacccaccacgcccggacctgattatatcttttgaaagtttctatttgccaatgagttctaggtacctggtgctgattttaaaatatgattcttaatttgttaaaaatttatctgctcccattttcattcgttaatacaaaacttaattcattaactctctcacctaaacaaataacctcctaaatgatcacaccttcatttccattctacacttgcctacattaacctttctgacgttcacctccagccaagacaattccctgctcaaaaaaacaagtacctacaaactaaacttctttccccaactttcacagtcctctaacattacagtgaccatcctttcagtgtgttctttctacactgcaatctggactacctgacattccaaatcacctccccaaattagcttttcacttaaccctgtgttcaaacaaaatacaactaattctcaaggtgatgttcaaatgctccaccaggaaagggaaaaaagtagtagctgcagagaatttattatgtatataataatacgtccaatgcacttaaactcttaatttttatactatctacactgttaggtaaacaatattagctcctatcttaaaatgagagaaagggatgcagggaataacagctggaatttgaaccacatctgactccaaaaatgttttcttaacacaactctgctgccttgacaagatggcagatagatacaatgccgtctagtgtagctatgtggctacctgatctctgctgaagaaaactaaatgacagcaccatacccaacaccctagaacctacaaaatgtccccttacaaaacagacacttaacaggaaattctttttccaaagaaattgtagtggtatcagaaaacaggtaaattttgaaaagtttcaaacttctctgtatcagcccaggaatccgaccagttctaacaagtgaggtcagggacagatctagcatgtctgctttctttttctacaagtgtttcaaataaaaatttcccagaaagacctaaccatgaggtccaaaactatctcaattttcaagctaaataaaatttcccccactcatccatctacagtgcctagtccagatgctacacatacacatccaagaaataagaaactagtggaatcacctagaaaactttatggtcactgctggtatctgcaccagagctttgaatttgcaatcactgctgtaactgtaatttttaacattcagtgtgatgagaactggcttcgataattctctcattttaaagataagaagccaaacggtcacaaaggaagtgactggcccaagatcattaattaatggcagagtcagtactagtaccaagcttttcaagctcatggaccggtgctccactatacttccacagaatacaatgttgggagcctgaaacctgtatgttaagtcaaaattgtatgtaattgtcataggccatgactacacagaattaacattcaagatttttgtgcaaattcaaaaatgtcttccccaccaaatagtattctcttaatttgcaaatactgctgatcacactgtaataatcgccacacatcagcatatccttgatgtaactttagcagtataatttagttcttgcctgataaacatgaaagaacctacttttatttccaattccaaaaaagtcaagctcctttgaaccctattgttaaaatacgatatatatacataactatttccttacataattaagtcaaattcatatggaagtattaaaatatagtaagactttttgaagctcagaccacttttcaattcctagctatacatttgaaacacatgtaatccacagctaatctgggaatgaactcatagaccagagtatgattagtacattgtagcagttcaatcactcgggaaccttctctgtgtcaggaactcttatattttaaataaaacagtttctacctttgaaggtctcaaattttgtggaagatgaggagagagacacataaagtactttcaaaaatatagtaaagggctgggtgcggtggtttacacctgtaatcccagcactttgggaggccaaggcgggcagatcgcctgaggtcagaagttcaaaaccagcctggccaacatggtgaaactctgtgtctactaaaaatacaaaaattagctgggcctggtggcgggtgcctgtaatcccagctactcgggaggctgaggcaggagagttgcttgaacctgggaggtggaggttgcagtgagccaagattgcaccactgcactccagcctgggcaacagagcgagcctctgtctcaaaaataaaataaaataaaatatggaaaagggtcaagaccaaggtatgtaggctgggcacagtggctcacacctgcaatcccagcactttgggaggctgaagcaggaggattgtttgagccaggagttcaaggccaccctgggcaacatggaaaaatcccatctctacaaaaaatacaattagctgggcctagtggcgtgtgactgtctgtagtcctggcttcgtggcaggctaagccaagaggctctcttgagctaggaggtcgaagccgcagtaagctgtgatcataccactgtactccagcctgcacaacaagaccctgccttaaaaaaaaaaaaaaaaaagaccaaaatgtccccttgccatactatttggatggcaaggggacattctgaccagcttcagaaaaaaagtgagagagtggccagggaaggaatcttggaataaaaagtacagctagagaaattaagtgacttaccttaatggcctttacttcttggcgaatcattttcagtaaagaattctgatcttctgcccatcgaggtggtgttttgggagaatactaaaaaaaaaataaaaatcacaaaagagcatttaaaacacttagaaacaatttcacaatgaaatgattccattctttcctgtttaccttgtaacttttacttggtgatagtgaatatttggtaggagatggtgtagaatgttttatttctgaatccgcatttcgcaaagaaccatttttatagagaggatctccttcactatagttttcgagttcctgcatgactgacttaagcatctcttttacagactccaggggcacaggcaactaaaaataaaagacattaattaagggctttcatttgcaaaaaattccaaaagtaaaaactctaaaatgatatattttatcttatttacatttttgtcactttaataagcactttacactttaaataataatacacgtgaaagtgttttttaattatcttttttctttgtttttctgctgttttgtattatttttatttttttgtctttattctattttttccttcatgaacacagaaaagtgttgtacaatctaacatcttctgattctaaagtccatgctctttctattacttctgttaaccatgataattgtagaggaatgttaacttggaaagcttttccaagtgaacaaaataagttactgatgttttctaactgattttcaatggtgacagaaatacagatgctacaatacaccagacaacataaatcctaataaaagagtagtaacacaaattaaccaacaaaacactcagaagactgaacataatttaacatcatcatgacaatctcaaacagctgacagcaagaaaacaagggcgttcataatggctgatgacgatgagaagaaatgctcttaagttgtcagcaacaactttcaatttcagcaaagttcattaagaattagtcctgaggttataatatttgttttgattacactgctaagataacaaaatcaatgtcttatcttagaaatcttttctaattccccaagaagtactttttaagagcatatacctagattcccaagtttaaaaagacacaccaaacctaagacaaagcaagcaaatctaagcatttagacacacacatcccttctgtgcattaataacaacatattactgagtatttttgaaattaccaaaatataagaccaacgcaaaaacactgaccagtgggttatcagtaagaacgtacatacaacaacctgctacttactttcttgaccactgaaagatttgaatcactgtcatctaaaatctttattaggtagcccctggtctttctcagataatttttgcattcttcttgttcttcaggagaaagggcatcatttgcaatgtcttctgccttcctgtgaaaaatctatacaaataatgcttttatgaaatcattagctttttaaaacaaaaaactttcagcttggccacgcatggtggctcatgcctgtaatcccagctactcgggagctgaggcacaagaatcgcttgagcctgggaagcagaggttgcagtgagccaagattgtgccactgcactctagcctggccagcagagaaaccccatcttttaaaagaaataataaataaataaataaaacttttagctcaagtactgcatctacttaccagtgcaagattccaataagaaacaacactttttatagattcaaaagcagtcatagcatcttctatatttccatttactgcatccaatatagcaaaagttacgtgtgcgtcttcttcatattcaacaatttctgatgcctaaacacacagaatagtttttagtcaaattgtttatactcagaatataaaacccaaatgattttccaaagattttatatgatcttaagagacaaacatctcattattcttctctgtcatatcttatctgtgagagctagtgaatttagaaaacaagattaccgttaaataacaaggcaattaatttaagcagtgtatagctccatgtctttgtttataaactggaaattcccatctccaataaattcataaaggaactctgttacctgaatgtctacactatgaaaatgtttaaacagaggatcaataggttcaggaatactgttcttcttttttattatcttcaacaatggcaaaactttcttccaataatgaacacttctccctatgtattctcgttgatcataaaaagaattaagaccactgccctaaaaaagaaagttaaaagcacacaactttaaggaacacgcatgattagatctaaagttcatttacaagttgtaagaactggctaaaatttcaagtcaaaaccaaatggtacctcaatagtcatttgttcaacttctaaatactgtaataactaaaccaccttaataccagtgaactcactgcaacctctgccgtgcaggttcaagcaattctcctgcctcagcttcccaagtagctgggattacaggcacctgccaccatgtctggctaattttgtagttttagtagagttttttttgtatttttagtagagacggggtttcaccgtgttagccaggaatgatctcgatctcctgaccttgtgatctgcccgcctcggcctcctaacgtgctgggattacaggtgtgagccaccgcacccggcctctacactcaacttttaaatgcttctaatgataccaccctaacgtagcaatcccaactgctttttaacagttgccatttttagatagctgaaacctgcctcttctgtagtgtcagtttgttcaaaaggctgaccatctacacctaatggtgacacaaaacacaccttaaatatttagaaagatctataatggtcttacctacaaagccttgtgctaatttttttttaattttcaggctaaataattatcagaacttaattattaaggaataacagtaacagctcagctaatatgtaacattcactgtgtgccaggcattgctcctctaagtgcttatatttaactacattaactattttgcagcaataaaaaacacatctgtcataatatgacaaagctgctgttttcagaacaaaaaaactttcaataaaaagttcatgattttaaaaaattaaggtaatgttcttttaaaatgcttatactttaaaactcaccattttctgaaggcattttgcccaatgtacaagcagagcaggttgaaggccatgtttttcctgggctcttagagtgtttatttcatgctgaactaaaagtctcaattttgctgagtttccaggtctaaaaaatagttcaatttactaaaattgctttctaaatacacagttcagcgcttacatacatatatgttaatgggtcacatgacaaattaaatcttcacatgaggattaaatccctggtaaaacctacgcactaagtgaaagcaatatttttgttttactacttacactgcttttctgtgaatcagagtacaaaccgcatcccaccaagatttttgtctttctgtacaaagctgtttacatacaggaaggggcaggcataacggctgataggagctgtggtgagaattacatttctcctttaattgtaagtggctggtatatactactccaaggagaaatacctgttttatttaaggaaaagttaagttagaaaaaaaaattaaacaaaattcagaatatttaatttgttaaaatctttgcttacttcaagatctaaaatacatattgattcaggtgcatttgtttcaagccttgaggtttcctggggcaaatgatggaaaagctgttttagccattttcggattccaggtaaagcaggcaatgaattccactgtaagccaagccaagtaaggtgctgaagactaccattatgtgctcgaatagcacctgaaataaaataaaaaaattggcttaagggtttgaaatttttccttgtgccattagttttgccaacataaacaattcacattatatatatcttaattatataactgcttttctatatcaaagctggagggaattctatgttaggcaaaatctcatgttcttattaaatgcattctcacttgattatttctagaaattttaataaaaatagtagtgatgaagaatgtttaagtccatcttaaaaaatgacactgactagaactcaataaaccaaaatcaactgacaaaagccaaataaagaacacctaacctaataagaaaccccaaaacaatgggttttcctttaagtcattaaagcaatggaacaccactatataatccatcagtacagtaaagaaatctgtttttctacaagaaagtcaatattgaaaaggttatgcgcagtcaggagttcgagaccagcctggccagcatggtgaaactccgcctctactaaaaatacaaaaaattagccgagcacggtgtcacgtgcctatagtcccagctacgtgggaggctgaggcaagacaattgcttgaacctggcaggcggaagttgcagtgagccaagattgcgccactgtgctccagcctgggtgacagagtgagactctgtctcaaaaaaaagaaaagaaaagaaaagaaaagaaaagaaaagaaaagaaaagaaaagaaaaggttatgtgcttctggaagcatgaagaggtataatctttctgtcattttggcaatttgcaagacttaaagatgttcatgtcctttgtctcagtaattatgtttataggtatctctatggaaataacttgccatgaagacactttttgttgaagtttttatcagagtatgattattaacagtggaaaagttgagaaaacttggatgcccaataacagaaagtagcaagcaaattatgactacttcataaaaaagattatattgccaataaaagtgatatttatagttttaatacagagactatgggagagaattcatgaaggaagcaagataaatcatacataaccatttagatgaaaaatatggccagatgcagtggctcatgcctataattccaacactttttgtttttgagacgaagtctcgctctgtcgcccaggctgtagtgcagcagtgtcatcttggctcactgcaacctccacctcccaggttgaagcgattctcctgcctcagcctcctgagtagggactacaggcacatgccaccacccccggataatttttgtatttttatgagnaagcgggggggnnnnnnnnnnnnnnnnnnnnnnnnnnnnnnnnnnnnnnnnnnnnnnnnnnnnnnnnnnnnnnnnnnnnnnnnnnnnnnnnnnnnnnnnnnnnnnnnnnnnatttacctatttctttttgtttttagaggtttgtagaaaatgtaacattatgtttgtggctcatattatatttctattggatagtgctgccctagatgttttctaaatgcattgagtcagcagcattttcatgatattatatgtaatatagtctgaggtcaaggggtaaattttctttatttcaaggcccttccattttacttgtattgatgtttttatactgtcctcacggagtggtgtgcatgtgtacgtacatgtgtgtacacatgcatctatgtaggtgagtgtatgtttgtagaaatgtacttttcactaatagagtcttttcttgaacactctggggatatcagagcttgcaaatcttatctccatcaccactaagttgtacttactaccttaagttattaggagtgaagagaggatcgagatgacacttctactacaaggtgtccaaagtgagtttaaatgttaccttaaggcctagactacctagcactcagaagaaggtaaaatgtgaactgcatacatacttgcaattctatattttaatatggatcttttagtaagatatttactatttgacaagaagtaatgaaaaatgtcttattcagataaataaaatttatgtagcacaatagctgaggcaaggaggtcaaagaaccaaagaaaatgagttttgacttaacaggtttgagccaagaatgatctacagattaatatttttctctgaatagacaatgtaatgctagcaccattttctctgaggaaacagtataatattgaatccttgctgaaaaactaatgttgaagaggacactaaatctttgcagtttacaccttgttgaggttacagtacagtcaaaatattctaagcaatccttatacagaatttgtgtaaagttatgatggtcacaggttggtaataaaaatttatcagatatgaggctgaattctggattgcatcatcccattaggaataaaatttaactctgatgaattttccaaaatctcacagttagaatgtaagtaaatgaaataatatctatacaaaactacctaggatgtgtttctattgtgtttatggcaaaatttatctggcttttaatctaatacaaagcaaagaagagggagtcttagggttgacataaaaagattttcctacataggaattttgagtacatttaaatgaaaagtttatatacaaaatcctggagacaaatacgtatttagcaatcactcccacctttgctgtagcttttaccctcagtgttaacaaataacaaaaataacaaatggcattatttgttttcttattctaagccctgctgaaatttttaaaatggcttttttttttcactgtgtgtgtaaccatgagctgaagaaatgaattcttacaggcagaaaacttgagactttatctttctaccaggcaactggaattgctaacacgtcaatgttttactgcataaagtaaatggtctgatggtcttacaagcacaaagctcattagtgatcattcgtcattgtgtaagtctactgtcccttgtccaaaaagaaaattggtgactgaatcattgcaactattgtgatatagaagtgagggcttggctacttactaagatttaaaagtcccctttataattgaatttagtctcttctataacagtatttgctctccttgtttgtatattttgtgtcagatccatgagtgagaacacaacctcttaaaatatattcatttttaaaagaatcaacattttttatctctattctttataaaatatatccaagtcaatcaatctgacaaggttaggtagtatggttcagattttaaatgaattatgatattgaccaaggttattttgagttctgagaaagaaaaaaaagttttacgaactgaggaagatcatggccctttataaaaaatagcatgattcaaatattttccgtaccttttaatagcttgttaggttgaaaaaaaccattctaaatggtaaaaacaaaatataaaatattatttttatgaccatattaaacagaatattaaatgagaatagtagagggctataattattttcaataaacaacatattttgatatgcagcagctttcttattctttctgcagtgtttacaaactgtgcaccttttgaaagaaataaagtgaaactagttacagggctgcatgtggcacagcatggggcggtcaccagcatgacgcagtacttgcattttggaactaagttaccggagacctgtgtttggttctggctccagccctggtccttgttaaccttgtaacccgggatctccacttaaccccagatgctcatcataatgccgttataaagaccaaatgagtccacgtacagtagatgaagagttaaacaaagataaaatgtcaatgtctgaaagataaaactgatggctcacatagaacactgtaagtttcagattgccaaagtcaaggggttcagaacatgaatggcctctccccagactggtttggtaaactatctgatatacacggtgaatcattttaaaattgcccttcgggactgaaattgggcatcacttgatatcatttcccatgggatatttttccaatgaacgctcacagttcttgctatgttgcaaatgtttaaaaactctactaagactgtataatgaaatatgtgttgttagtgcaactgtattaaatattaaacatataattctaagttgatgtttttcagaattattttcaacgaccaagaagaatataaaaaagaaacaaatcaccctttaaacagaaccactttagtgcaaagtaagaaagaatatcagctcctgctaacacaaagaaggtttgaatgagagatgactgcagatggtggcctggggattcctatgaggacacaccctagcttttcccttttataacaaggttcatgaaatctctttattagtgctgtggactcataacatgtgattgtcttcctgtgaggaattagttattaaatgaaagaattaggtttcaaaacagggaatcactcaattgggaatatcatcacccccaaatttatttatgcagattaaaaaccatcactagatggtattcattggcacttatttaaatctcaaagtcacaactttatgcatgtattaccggacacgttgagatgctgcctatcacattaattagcagatacatagcttgtaatactaggacagcttcccattcccccacctctttgtttttactctgtttccacccactcaatagcccagggagccaagatttgtttcatgactgttcagtccagtgatttattataaaatcatttttgttcaagtactactgagttgaaaccaatttatttttaggttttaaatcaatagaaaattattttaaaatatatataactagtgaacataaagaatccccaaaggacaaagaccaacatttgctttgtcactctgaagccacacgctgcacactcacagatgccaaggaagggaggactgcatggagccggcggcgtctgaacgtacctgtcatggtaaatccaccaaccaataaaccaatatctcggccaccaactatgatggcttcgctgcgctcttctgcgctgccactgtttttggttctccaggcagcccatattccaaccagcaaaattagaaggtagaacacgatgatagctatcagtccttccacatggaaagccatttttatctaatgatccagattcttctgcagctggctacttcattaagtcttctgaagaaaatacagggatgcattataaaccagtcaagcactatgcacatgtaggcagccaggaataaaccagctggctcatgcgagatcctgtgccactcacagaaagagtacaaccctgaaaccacacgtgaaacgggcagttaacaataagtgtccactacattatcctacttctatttaacaatttaacattattttgagtttgcaagaaacagaaaaaaaaacggaaatgtagtttaacaaatggaatcataatccttgtgtgtttcatacatgctttaaatttaaaattaaccttgtcgtgtatatcttaactcagtaactgtcaaatcatttacaaagagtagcgctgtatctgcgttttggaactaagttactcttctagaattatttattctagaagtgttaagtgtttcataaatgaccattctgaaaattttaaaatattcattaatttattcattcttttatctgtcctttcaaacaacttcagagaatggcttcagtagtaatctgatataaaaatatctgaaaaaaatctttagaaaaatccatttcaaaaacacatcaaactccacattttcaacaagcttctgtagttcaagttactatagcaactaagtatgttttttgttgttgaaaggatccattctcttgatcttcttcgcccaatatccttcattcaattcatcaccccccattaatggtacatacaggaaaaggttttgttgttgttgttgctgttgttttaaacacaattgcctaaaagcacatcagaagcctcaaagatattaaaatcaagactcttagaagacagatgtcaagttcgaaagcattcaccttctgaaattcttgtccccttttatttttatttttatttattttttacctttgtgaccacagctgttccatgaacccaaactctcacatacaagtttctgggggaaactctgacatttgtgcgtgcaggtgggtgaagagacgttgggggaaagaatcagcctctctggaatttaaaggaggcaaaagaagcgcccgcgggctgtgtcttctctgcctttgtgagcaaccaagcaggcaagttcctctccgcagcagcccgatgctctcccggccccctgcggcctttcctcggccccctctacccatttcctgcgcccagactttgtagcctcttgcaccctgacagcaacggtgccagacagcaaacccgccctcgcatcccaccgagagggaaaaacgccgcgtccctcccctctaaaaccgcccgggctcggtgcccaaggcgtttccgagggtgcgggcccgtaggcgcaggaatgcccgctccgctcctacctggagtggtggctgcacgcgaaagcgctccgcccggggccgccgccccctggaaccgcgaggggtgtgggtgcgagggtgcagaaagggagggtgcggggtgggtcggggtgcagtgcggagcggggccgggcggtcagggcggctcctcactcggcgtctccaagaacctgggagcgcgcagagttgacaggtgttggcgccggcggagggcgcggcgcagggcgaggtgggaatcgatcgagtattgggaaaagtcccctttataagggcggcaggcgggggcgatcgtcagacatccggaggcggacgtcagaggagagtggtgctagggcgtgtgctagggacgctgccctcgcgaggagggtgggtgtgcgggatgcgaaggaaacggggcccaaggagctggggggcaggctgggctctggtccgcgctgccagccatggtatccccatcctgagacaagtacctgctactcccatctcctcctccagaaaactgggcggagattccttagggtgattcccagtcgaacttctcatccctctggttggaagctgggaatggggagggtctcagaggattatattttcagaagcagcagctggaagcctagaggagagaagtgtcctgttcttttcttcccaggtcagagtctggaattgtttcctgacgagtctctctgagagggaaggggtcctctccccgcggcctcccctgggccctgttggaagctgttcctggcgtccctggtgatgggctccctgaaggagacatttcaggaaggtttagaaagtcctttttacattcatacccctgccacttaaaagtagggctaccatgaaggacactaggcgtggtccagattaacaatgaggttatcacagaagtcagacaagatggctttcctggtagagccctttgggcagctggcctgctgaatatcctattccagcttacaaaaatttgctgtgttagtttacaatatatccatatacctacctatttttatagattatttatatattacacatataaatatgtatctatagatgtatttctacatctaggtgtacatggatagatgcagatacctgtgtgaatgtgaatggaggaagagagaagggtgggagagaataagatagaagagtcacaagccacaaagctacaagcactctggccactttctcacttctttccgcattccaccatgagagtgtatttaacagtgaaatacacaagtctaataagggatagaataaataagagtgcctctgaactactgttcacctctctaggccaatcagaccatctccccttttcttacactggattttgaaattaacttccaaatttatgttactaccccttttctttcttctctgtataaacaataactgcatccaactacctcttttgaggtgagaaagcctagggagttcaaacagaaattaagacgggccaaaaggcctgcaaagatagttatttcccctgggtaatatgactagttcattgattttctggaaaagacttaggttgccttttaatataaccccatttttacatacacattttattaatttaagcaattttaaggaactgacagagcgaaacagagatgggatttcatataattacccatgtgttttaaaagaggttcattcattcattcatccatccattcattcattgtttttgtcttctataactcattttctgattctgggccttagcctcaggttaactgatgtatttcctgccagaatatactaatgatgatgatgacacacagcttattgctgtagcagggcaggcatgggcaattgcagtgtctgaaatagtgcacaggcctaaggtcagggagcttgactcagatccaaagagagactgaagaggcagccgtcctcagagaacatcaccagcctttcggtatgagaattgggagtgcagccaaagcacacctcccagagcccacctaatccactttgacaagccaggcttgccagactatggactcagtgccagatctgagaatggacaatgaccttgacagtggccaaattcttgcctggcagagcggctgtcctccatgacaagaaacaccagttgaaaatgacaactgctgatgaattgagtctagttctggggagacatttcctcatttgctgagtcctttgcgctccgtgtctgatctaaggatgaagctgcatgtgaatttctgtgccaaggtgtaatttcccagacacccatttctcttttgtctttaatattggtactttaatgtgtacctcttcctccactctcctgagaatatgttatcatgcacggacttagggaactacatgtcagtgggagatcaattcccgcttttggggagaaaaagcaggttttgcatttataaatcatttattttttaaaaacacattttctaagtgccttttacattctgaacactgttctcagtactgagaatacatgtagaaaattatacaaaccttgccctcaagtaacttatccatgaaaagaaagaaggaacaaacaagcaaaagctgcacttctatatactattgtaagtgctgagaaggatgtagcatatctgtacacacagattctagggaaagttcaaacaaaaggtcttaatcagatggaggaattcttctcggaggagcggggagagtcatttattcaataaatatataaaaacacctggccgggcacggtggctcacgcctgtaatcccagcaatttgggaggccgaggtgggcggtttatttgaggtcaagagttcgagaccaggttggctaacatggtgaaaccccgtctctactgaaaatacaaaaattagccgggcatggtggcacatgtctgtaatcccagctactcgggaggctgaggcaggagaattccttgagccctggaggtggaggttgcagtgagccgagattgtgccactgcactccagtctggctgacagagagagactctgtctcaacgaacaacaacaacaacaacaaaacacctgctgctttgtgctaggtatatactcaattgattgaaatgaaaagatccctgtctttaataggttaacaccctctgaccttgccattcaaagtacacttcatggaacagcagcgtcagcattacatttttcttttttaataacagctttggtaatttgagaatgtcatcacttggtctatacattttgaacatgcttcaaatatgatccaaatgcatattgagactgtgggggcccattttgctgaagttattatccttcctaatgctccagtttccccatacaatgtcaactcaaatctttcatactttttaatggattacatttagcttaaattaaaattggccagtcatttccaaaccagggtgactatcggaattgtagagttcttgaaaaattgcagatactaaggccccacagcatgaattctgactttgtatatcttgggcaagggtttgagaacctagttttctttcaatccctccccaatgatcttgatgacaagctgggattggaagactatgttgagtttcagagtggaaataactttgaaagtcaaaacagacaactttagctcaggtttactaattatgggatctttgtcaaattaagttatcttcactgtgttttaaagtggaaataaaaaaaaggtcatttcaatctcttaggagtgtgaggattcattgaaatggcatacagtgagccctttgcacccatgggttctgcatccatggattcaaccaattggggattgaaaatatttggaacaaaaacatgtgtgtactaaactcatacagacttttttttcctcatcagtttccaaacaatatagtgtaagaactatttatatagcatttacattgtattaagaattataagtattctagaggtgatttaaagtatacgtaaggatgtacataggttatatgcaaatactatgccattttgtaacagaaaatgaccatctgcagactttggaattggagggtgatcctaggtatggaggaatgactgtgttttgaaacattgagtgcaatgcatattttccctttggtactcaatatatggtaagcaattgctgctgctgcagtttctgttactgttgctttgattcattatcgaagcctgctgatgttctggcctctggtggcagtcagttattaatacattgctggtgctgtggataaatgcatctgacctttctttacctaatggtaaagaaatattttgctaataacctcaggggtgcatcagaggttcatatatttggcaaaccacaccgtagactaaagtctagattctatttcttaaccaaattttaacataatccaatttatgcctttgtagatcaggccaggagtagtgtcagtcatccactttcagagagatacatgtagaagagtcctctcactgcttctttctcagtcttttctccctcagcttcacactcagtccttagcaacggttcccagctttctttttaaatgcacttttttttccccaactagtatgaagctaaccctttctcattcttttagactcaactcagatatggagcaaagagaaacttccctgatttctgtctataaccagactgggtcatgtgttccttttctaggctgttcgcccatggtacctacttgtatataacaatggtctacagatcacgtgcctgtttctcgattaatctgtgaactctgtaaaggggactaccccattccatttacctttacctacagagcacttagcactgtgcctggaatactactagacaaaaacttagttatactgtatttgtttacagaaggaaaataagagactcaaaatgagtaaatatctgagaaatcatttactcgaaatctaaagtagaaaactgagatttggaaaaggcaacatgaccattctagttattaaatacatgtatgtcatcatgggtttaaattgcattgatttgtatacggtcacacaaccagttagtggcagatataagacggagttctcatgccttccaaatgaatgatttttaactttgggtaaacagtgcttttacactcaatttgatattacactatcccaaaattgtacatagtctttatttaaaaatttacatttatatttatttttgcaattactataatttaaaaatgcagtcataagaatgatggagaaaaaaatagcatagggattagagctggtagggggaagactgacatttttggtaaaaattctgttacaccaatctgagcatgttagaacagacctctatgtcatcgctacaacaataacactagaattaatcacttgagtacacatcaatttaattgaaatgcaattgcccaacaaatgccaagttattttcttgtgtccttatgataaatgacatatggtgactaaagcctcatacttctaaaacaagcagttatataggaattatacagttgtataccttcatcgttataaaaatgtatgacagtgataaagtgtatctcagagtcaatgatctctctccattggtagtattagagtcattctgtgcaacacttctatagttcttcatatcaggataacatatttttccttctggttattattccagtattttattatgaaaatattcaaacaaatatcaaggttaaaacatatatcaaagttaacatccatatattcaccacctaaattctaccattaacatttctttatcagtctgtctatctttttaactattcatcaattcatctcatttatttgatgcattcaaagtaaatggcacaagtacaattcccctaaatacttcagcaagtgtattattaactagacattaataattttatatatatatatatatatatatatatagttgttgttgaggtgaaatttatatagaatgaagtacaggactcttgagagtatgaaatgagttttgatatattaaataagttttgataaatgcaagtgtcattttaaatcaaatcctgatcaagatataaagcattatttttgccccagaaattcttttatatattttctgccattgcacctaagagacaaagaatgttgtgatttttcttccactatagattaattttgtctattttagaactttatataaagtgaagcatacaatgcatatttgtacttcacatatttttgagactcatttatagtgtcgagtggaaaattatttctttattttttcctgtcatattccattgtgggattacaccacagttaattgtctatgttctaattgataggcacctggggagtgtccaatttttcgtgattatatataaagctgctccgaacaagtatttctgtgaacacaggtttttatatcttcatatccttgacagcatttcgtgttatcagtcttgtttgaaaacatttttatgtattttcttttaattttcattattctggtggttatgtagagatatgtcattgtgaacttaatttgcattttccttatgcctaataatgttaagcacattttatgtgtttaatgattaattctaggccttcttttgtgaggaatatattcaaaaattttccccatgtgtgatgagttgcttgtctctattgctgaattgcaaatatcatttatacatcagggatatctgcatcctacatatgttttgtgaatattttctcctactctgtggcttgcctgtccattttcttaatgagactcagaagttttcaattttgaataattctaattattttcttagtttcagtgtcctctctgtaaacctttgcttatctcaagtcaaaaaatgttttttttttaaaaaacatataattttagggttaacattttgttctatgatcgatctcaaattaacatttttgtatggtagaaggaaatgttacatcattctttttccaaatattttctgtctcattctctttctcctcctcttctacgtctttgagcatatacatataagactctttgaatttgtctacagaatcttaaggttattttatttaatcttttaaaaatgtttttctgattggataatttttattgatatatctttaaattccttgacacttttttgtgatctccattatgctgtaaactcatccaattctttttaaaatttatggtttttttttaattattacactttgagttctgggttacatgtgcagaacgtgcagttttgtcacatatgtatatatgtgccatggtggtttgctgcatctatcaacccgtcacctacattaggtatttctcccaatgctatccctcccccagccccccagccaccacaggccctggtgtgtgatgttcccctccctgcatccatgtgttcccaacattcatctcccatttatgagtgaggatatgcggcgcttggttctctgatcttgtgatagtttgctgagaatgatggtttccagcttcattcatgtccctacaaaggacatgaactcatccttttttatggttgcatagtattccgtggtgtatatgtgccacattttcttaatccagtctatcattgatggacatttgggttggctccaagtctttgctattgtgactagtgtcacaataaacatacgtgtgcatgtgtccttattgttcaatgatttataatcttttgggtatatgcctagtaatgggattgctgggccaaatggtatttctagttctagatccttaaggaatcgtcacactgtcttctacaatggttgaactaatttgcactcccaccaacagtgtaaaagcattctgattttttcacaacctctccagcatctgttgtttcctgactttttaatgattgccattctaactggtgtgagatggtatctcattgtggttttgatttgcatttctctaatgaccagtgatgatgaggtttttttcatatgtttgttggctgcataaacatcttcttttgagaagtgtctgttcacatcctttgcccattatttgatggggttgtttgtttttttcttgtaaatttgtttaagttcactgtagattctggatattagccctttgtcagatggatagattgcaaaaattttctcccactctgtaggttgcctgttcactctgatgatagtttcttttgctgtgcagaagatctttcgtttaattagatcccatttgtcaattttggcttttttttgccattgcttttgatgttttagacatgaagtctttgcccatgcctatgtactgaatggtattgcccaggtttttttccaggatttttatggtgctaggtcttacgtttaagtctttgatccatcttgagctaatttttgtataaggtgtaaggaaggggtccagtttcagttttattcatatggctagccagttttcccaacatcatttattaaatagtgaatcttttccccattgcttgtgtgtgtcagatttgtcaaggatcagatggtggtagatgagtggtgttatttctgaggcctccattctgttccattggcctgtatatctgcgttggtaccagtaccatgctgttttggttactgtagccttgtagtatagtttgaagtcaggtatattttttgttctgaaatttctacttgttcctttggaattgttatttgtgctgaatttcctatcacttctttcagtatgacatattttccttatgtagtcaagcatagttaaaataaatgccttgtctgcttatggcaacatctgtgccatctagggtttgtccctgttattatcttttctaatgggaattggtcacattttttctgttgcttccatgtagagtgatttagctcgtatcctggataatatgaatcataaattttggatcccaacatattcttctcaccacttttgctttatttaccattttattttcatctaaatactggttttgtctcatttttaaaagtaatttattgaggtaaagtttacataacgtaatttcaacattttaaagtgaacaattcaggggtatttaatgcattcacagtgttgtgcaaccatcacctgtatctgcttcaaaagcactccaaagtaaaaactcttactcattgagcagtttctcatcacttcctcactcctttcagcccctggcaaaaccaatctgcactctgtctctatagatttatttactttgactatttcatataagtggactcaaacaaactgtgatactttgtgcctggcgtctttcacatggcacaatgttttggaagttcatctatagtgtagcatgtgtcagtggttcattttactgcaaaataacagttcatcgtatgcgtatattacaagttgtttatccactcatcgtctcattttcttgttgtactctttgcatgaaatatctgctttattcatttcccttgggtctaaagggagtctcttgtacagagaagacagagaaaaaaattaaaaaaaattttattctggcaatctctgccatttttttggatagtctaatccaattacctttaaagtaatcattaataagaaaagatttattttgggcattttgctatttgattcctgtagattttataacttttttacaccttatttcctccattactttcttcttttctttaatatttgtgtgtgtgtgtgtgtgtgtgtggctttatctccttctattatggtctgaaatttgtctcccccaaattcatatattaaagatccaaggtttgatgtggctctatttggatagagagcctttaatgggctaattaaaattaaatgaaggcataaaggtcaggacttattctgataagattatccttactgcttatagtataatgcaagagaagaaaaataaattgaaggaaatattaagcaaaacaaaattcaaacgtgaattttatgcacttgtttatagtgtgaaaataagagagtatgttctggagagaacaccaagggtgtagctgaaataccattctatagagtgattatccatgtatttaatcagctgtcttagctgaatctagaaatagagatcagattgtagcagcagaaatattgtctgctggcattaaagagttgatagagacacaggacataataaaagaaggctacccgatttctgaaattctacaggatgggacaatagggctagtggcattcatccattcatttctaaattttgtaatttaaactttctctttttttttaatttaggcatatacacctataaatttatctttaagaattgattgtgcagttatcctacagcttatggcattttaaaaattttcattaatcttaaagtatcgtttattctgtagccctttggatttttattagtgtgatgttgagttttcacatatttatgaattttgcagtttttcttctaatattgattattagtttcattccattgtgattgcaaatgatactatatatgatttaaattttttaaatctattaatagttgttttgtgcttaacatatgacctatgccataaaatgttgcatgtacacttgagaaaaatgtgtattctgctgttgttgaatgcagtgttctgtacgtatctgtaaggtacgattggtttatagtgttgttcaagtcctctctttgttgttttttttttcctggttattctatccgttaatgaaagtgacgtattgttttattataactgttcatataactattattttagtactaatttccccttaattatgcacatgtttgcttcatgtactttggggcctcctgtttggtgcatatatatttatagttgttatattttcttggtaaattaacccttaaagttatgtaaggtccttctttgactcttctaacagcttattataagtctattttgtctgatattagtatatatacatgttggttcaaatgtttgatggtgtatcccatgtcccttaggctctatttaattttcttaattttttttctatatttattccttagacttaataggttcagtttctcatcttcaagtttactgatttgtcttctgcttgttttaaactgctattgaactcctgtagtaaattttttgttgcacttattacagtttatagatttataattctttttagtttctttttataattttggtatctattgatattttcattttgtcatatatacagaaatatgactatatatggtcatatatatatatatatataaagctgcttttactttattgtccatgttgcccttaaaccctttgtgtatatttaaaacaattgttctaaagcctttatctagtaagtccaatgtttccacttcttcaaggacaatttctatttattttgctcctttgaatgagccatgatatcttgtttctttgcatgccttgtgacttttggttggaaattaggcattttatgattagaatgcgataactccagaaattaaattttccccctccacccaaggtttgctgtttattttgattattaaaatttgtagtagccaaatttctaaggcttttccaaattattttgcaaagattatttcttattacatgtaaccagcaaagtctccatgcctttagctcatcagctagtactttgacagaggtttatttgagtgacaaaatagcagggaggtagggaatattcaccagattgtctctgtgctggtgtacttcttcaccacttagctttatctactctgagtctggcgattatccctaagtgaaagtgtaaggcctttgcagaacctttataaaaacgtgtctgtttttatctttgatgtttctgtggggaaatatgaacttagtgattcctagttcacaatttcactaatgtcattcctcagtgtctcatcagttatgggattctgtgattttagttttattagtctctaaatattttataatttaccttgtgatttcttctttgacacatgtttacttataaatgtgtttaattttcacatatttgggtttttaaaaagttttgttctgttattgatttcttgttttatttcattgtgattaaaaatatattttgtgtgatttcaatatttaaaagtttaagacttattttgtggcatgaaatatgttctattctgggtaatgttccatgtgcacttgagaactatgtgtattctgcttttgttgggtgaaagttctgtatatgtccatttggtttaattgttgtatagtggtgttggagttctgtttccttgttaatctggctattatatttattactaaagtgagttattgaagtctgcaattattatttagaactgtctatttctccttttaatattttcagtgtttgcttcctttatatattttggggctttgttgtttggcacatgtaggcttacaactgttgtatatccttggataattgagtctttaagtatataataatcttttttgactcttatagcagttactgacttgaagtctattttgtctgatactatatactctccatctctcttttggttacaatttgtatgaaatgtcttccatcatttttgatttattggtgtctttgtatctaaattgaatctgttgtaaatagcatactgtcagctcatgtttaaatttaccaatctctttattttatatggtttaatctatttatatttaaactaaccagtaatatagaatacttacctttgccattttgctatttgtttcccatttgtttaagtcttgtctattcctcattttttccattcttcccttcattttgtttatttttttcttatttccctttatgtacctatttttagttttcttcttagtagctacactgggaattacaattaacattctaaatttctaattatctagctcaggggtgtccgagggagagaacagtcgtgggatcttagtttctatttctggttgggccagtaaagccccttcctcatttctcttatctgcttatcactagagacagaaagtaaaaatcacggctttaggctgttaaaaggctaaaacaaaacaacaacaaaataagacagatcgaacaagtttgatctagttcaaattgataaagcttagctttaataacatgcaaagactctgttccaatatagtgttttccctgccccatatattgtcattgtcacaaatttcatcttcacacattgtaacatggatgtgtaatcattttcatgaatttgtgttttaaatcctatagaaaataaaaaatggagttacaaacaaatcaaagttactttatcttggtacaacatccacctgtttgctataaaaacctttgttttatagagttctggcagttttttctgtttctgcttgtttttgaaaagttttttggagtgacaggattttggagatgtctactataccattttgctgatgtcctttatttctctccactccactctgtcacaagcagacagttaatatggatgaattcatactgcaatctctgtcttccctgtggagggaggcaactctaatcttagcttagttcttttggcttttgatggtctttttggagtctgccttacgcatgtgtgtttcagaagtaatcatctacagatattgatagagtttgtacacaatatgtaaggctccccatttcctcttttccaggattttctgtctcactttccagcaggtgtggttgtctgaactttgtgttctgatttcttaaaagcagaaataaagatggtaggtttttctactgtagtatttactgccttgaatagtataaaatggaacctaccttcaatcttaaagccataataaatgaaacacttgtcctgtgccattttttccttttaattattaacttttcttcatacctgcctaggtttgatttttcttcagtaccttcatttacttttatttttttgcccagaatttatagttatctgtgggaggatgtgtctgatccgagtttacttggctaaaacagaggaagaacctgagaagtgttttgaacaccatcgtgataccttctgccatacacatgatctttccaccacttgcatgttcttattttcacttttccacagtgggtcaagaagaggacgccaagttctggctctttcttcccccagaatataacacagtcaccttgcaaatggtgaaatataagtgaggcttctttctacaagaaacctttcccattatggcgtgactgtccaatatgtttgtgggagctctgagcagaagaaaaacctaccatatttcctgagttatattccaactccctagactttgacacataccaaggagacatgatgcgttttgaattgtctgatctgaaatcgcatttgagttatattaacatgagccaccatgggaggaattactcagtaataaatgtctggccaaagttcttagaaaagtcaagagtgatccaaaaaaataaaatataaatgccaaatctaagggaaggactgaaaaacaggataaagtttatctctcatgtgaggaacaaggtgaaataaaactgaaatgtgttttggtcagatcagaaatgttaaaaaggcatgatctgggtagctaaagaataggtgaccctgacttaaagatgcaggaagtgcactaaaatgtgtaatttcaatgtcctagaagtttctttgtatttttttgttgagaatagatgagatattaggcatgggtaacctgatcaacacagaaatgtatgcttcataggaaaatagaagccaaatcacacatttcccctctctttgctccattattaacatcaatactatatactcaattgctttttgtataaaggatgactgttagtaaactatatttaaaaagaaataatacattaattacataggattatgcatcatacagaccttttgttttcaaatcattttaacactatttgaggtttagtttgagtcatgaaaatagctattatattttgttttgacattttgcatttctatcaaatttcttacagaattttatgtggtaaggagacttttctgtgagcttattttcaagcaacaaattaaaatttactcccagtttcatgtttgttttcctttaggaaatagtgactacaatattttccaagagaaagctgccaaatgaaagtgtatacaagagagtgggtttttaatagaagcagaagtttaggttactgttaatcccagaaatcaatgttgtcaatcttttatgtctctttcattttgatgactacttattgagcttccaattataataatgccaaaatgtaattttagaccttttttgatctctccccctatatatccatgagaagtatattataattaatgtatgcctttcattttctggtcaatagatgcattgtaaaagctcatcacatttttgtatacattttgccattggaaatgaatgttaaattacttatggatatagataaacctaagtaaacaaaattcaaaaaggatacaattgtctcatatgcaattcatcataaaattggaaattttatctgccattagttattcttgaaagcttctggatttaatactgtataaactgggcagcaatatagataaggctcatttagtgggcatactaaacgtccagttgacacccttagaattatataagaaaatctattgagaatgtttaataatcccagacagattgttgtgattaaatagattgcaagaaaatctgttttaattccattagagaatcattttctttttttttcttttattattatactttaagttttagggtacatgtgcacattgtgcaggttagttacatatgtatacatgtgccacgctagtgcgctgcacccactaactcgtcaactagcattaggtatatctcccaatgctatccctcccccctccccccaccccacaacagtccccagagtgtgatgtaccccttcctgtgtccatgtgatctcattgttcaattcccacctataagtgagaatatgcggtgtttggttttttgttcttgggatagtttactgagaatgatgatttccaatttcatccatgtccctacaaaggacatgaactcatcattttttatgggtgcatagtattccatggtgtatatgtgccacattttcttaatccagtctaccattgttggacatttgggttggttccaagtctttgctattgtgaataatgctgcaataaacatacgtgtgcatgtgtctttacagcagcatgatctatagtcctttgggtatatacccagtaatgggatggctgggtcaaatggtatttctagttctagatccctgaggaattgccacactgacttccacaatggttgaactagtgtacagtcccaccaacagtgtaaaagtgttcctatttctccacatcctctccagcacctgttgttccctgactttttaatgagagccattctaactggtgtgagatggtatctcattgtggttttgatttgcatttctctgatggccagtgatgatgagcattttttcatgtgttgtttggctgcataaatgtcttcttttgagaagtgtctgttcatgtcctttgcccactttttgatggggttgtttgtttttttcttgtaaatttgtttgtgttcattgtagattctggatattagccctttgtcagatgagtaggttgcaaaaattttctcccattttgtaggttgcctgttcactctgatggtagtttcttttgctgtacagaagctctttagtttaattagatcccatttgtcaattttgtcttttgttgccattgcttttggtgttttagacatgaagtccttgcccatgcctatgtcctgaatggtattgcctaggttttcttctagggtttttatggttttaggtctaacgtttaagtctttaatccatcttgaattgatttttgtataaggtgtaaggaagggatccagtttcagttttctacatatggctagccagttttcccagcaccatttattaaatagggaatcctttccccattgcttgtttttctcaggtttgtcaaaggtcagatagttgtagatatgcggcgctatttctgagggctctgttctgttccattgatctatatctctgttttggtaccggtaccttgctgttttggttactgtagccttgtagtatagtttgaagtcaggtagtgtgatgcctccagctttgttcttttggcttaggattgacttggtgatgtgggctcttttttggttccatatgaactttaaagtagttttttccaattttgtgaagaaagtcattggtagcttgatggggatggcattgaatccgtaaattaccttgggcaatatggccattttcatgatattgattcttcctacccatgagcttggaacgttcttccatttgtttgtatcctcttttatttcattgagcagtggtttgtagttctccttgaagaggtccttcacatcccttgtaagttggattcctaggtattttattctctttgaagcaattgtgaatgggagttcactcatgatttggctctctgtttgtctgttgttggtgtataagaatgcttgtgatttttgtacattgattttgtatcctgagactttgctgaagttgcttatcagcttaaggagattttgggctgagataatgggttttctagatatacaatcatgtcgtctgcaaagagggacaatttgacttcctcttttcctaattgaataccctttatttccttctcctgcctgattgccctggccagaacttccaacactatgttgaataggagtggtgagagagggcatccctgtcttgtgccagttttcaaagggaatgcttccagtttttgcccattccgtatgatattggctgtgggtttgtcatagatagctcttattattttgagatacatcccatcaatacctaatttattgagagtttttagcatgaagcattgttgaattttgtcaaaggccttttctgcatctattgagataatcatgtggtttttgtctttggttctgtttatatgctggattacattccatgttcatgggtaggaagaatcaatatcatgaaaatggtcatactgcccaaggtaatttagagattcaatgccatctccatcaagctaccaatgactttcttcacagaattggaaaaaactactttaaagttcatatggaaccaaaaaagagcccacatcgccaagtcaatcctaagccaaaagaacaaagctggaggcatcacactacctgacttcaaactatactacaaggctacagtaaccaaaacagcatggtactggtaccaaaacagagatatagatcaatggaacagagcagagccctcagaaataacgctgcatatctacaactatctgatctttgacaaacctgagaaaaacaagcaatggggaaaggattccctatttaataaatggtgctgggaaaactggctagccatatgtagaaagctgaaaatggatcccttccttacaccttatacaaagattaattcaagatggattaaagacttaaacgttagacctaaaaccataaaaaccctagaagaaaacctaggtattactattcaggacataggcatgggcaaggacttcatgtctaaaacaccaaaagcaatggcaacaaaagacaaaattgacaaatgggatctaattaaactaaagagcttctgtccagcaaaagaaactaccatcagagtgaacaggcaacctacaaaatgggagaaaattttgcaacctactcatctgacaaagggctaatatccagaatctataatgatctcaaacaaatttacaagaaaaaaacaaacaaccccatcaaaaagtgggcaaaggacatgaacagacacttctcaaaagaagacatttatgcagccaaacaacacatgaaaaaatgctcatcatcactggccatcagagaaatgcaaatcaaaaccacaatgagataccatctcacaccagttagaatggctctcattaaaaagtcaggaaacaacaggtgctggagaggatgtggagaaataggaacacttttacactgttggtgggactgtacactagttcaaccattgtggaagtcagtgtggcaattcctcagggacctagaactagaaataccatttgacccagccatcccattactgggtatatacccaaaggactataaatcatgctgctataaagtcacatgcacatgtatgtttcttgtggcactattcacaatagcaaagacttggaaccaatccaaatgtccaaaaaggatagactggattaagaaaatgtggcacatatacaccatggaatactatgcagccataaaaagtgatgagttcatgtcctttgtagggacatggatgaaattggaaatcatcattctcagtaatctatcgcaaggacaaaaaaaccaaacaccgcatattctcactcataggtgggaattgaacaatgaggacacatggacacaggaaggggaacatcacactctggggcctgttgtggcatgcggggatggggtagggatagcattaggagatataccttatgctaaatgatgagttaatgggtgcagcacaccagcatggcacatgtatacatatgtaacaaacttgcacattgtgcacatgtaccctaaaacttaaagtataataataataaaaaaaataattaaaaaattaaaaaaaattaaaaaaaattgatccatgttatctagcttatcaaatgtatcgtcatatagttatttatagcattccttcctgatcatattatgtccatgggatctgtagtgatgcccactctttcatttctgatatttgtaatttgtgtcctttcccatttttgttagttaacctgcttaaaggcttattaattttatcgaccttttataggagccagctctaattttgttgattttttctattgattttctatttttgattttattgttttttgctctaaccttcattatttcttttcttctacttactttttggattaaaattgttaactttttccatttcctaaggtgaatgcttaaataattaattgtattttttaaaattttctaatatatgtgttcaattctataaatttctttctaagcacttcctttgcaataccccacaaatattgttgttatgcttttatttttattttgttgaaaatattttcaaatctctcttgaaatttcttccaacacatgtgttacttggaagtgtgttgtttaatctccaacattcatattttattcagattttcttagttttcatgtaatatgtttttgtgtgtgtgtgtgtaccaggatcccactcaggataataacatcgagtcatcatatcacgtcagtttcctctgtactatgaggtgaatcagatttccttgttgttactttttaattattttggatagacattagttgttcattaagagtaatcatcagtattttgttgaccgtacctgaatttttgtgtgtttaatatttttctcatgattaggctgtggtcatgggtttgggggaagagaaatggcttaccacagaggtaaaatgccattcttatcacatcatagtaagggcacatgccatcatatgataaattatatgacttatcactgttaatgttgacattgaccacctggctgaagtggtatttttcaggcttttctagcataaaattattttctccacacttctttccacactgtgctctttggaaggaagtcactatttgcagccaacattagggggtgaaggattatgttctaccttcttgggaagggttatttatataaattacttgaaattcttttgtatagatactttgtctattctttcttattgtttatgtgttcattcatttactcacattggttttatctcatggatatttattttatactctgagttacaatccaatactacattatttattttgttaactaagtattccagcttaggaattaagagattttacagtggctatttgtgtccctttcaccattgttgcgggggtgtttttgtttaattttagcattttcttacctcctaccagcacaatatgttctaagttcatcttgtatatttcctgcccctgttgtagagtaaggcactttgccaagaaatcctatttccttttttggagaataggaggaagaagtaagacatgggttttgggtattctcattgttactgggatatcatttcttctagttcctctcagaaaaaatgtttggaaatatgtgtgaatagtaactactatttacacacacacacggttaagtcacagctactttaactaatgaaatcctccaacacatacatatacacttacatacacaagtgtgcatttatttaaaaaaatatttaagtgtactacaggtgcaaacttaaatacatatggggttcagacgacaacctaataagtgagatgggaatggtaaaacaattgcccccttctgcctatcttttaatatatgtgtgtatatgtatatatgaaaagatagggagaatatatacatatatatgtgtgtgtgtgtatatatatccttctatatctattttaagccaaaaatgggttcatactgttgtctacaactctaatccagtattacatgaattattctagccttccctccttgctcatctgtaactccctactctaacagtgagaaacctggcttctaccatgtgccatctatttacttaattattccatttcaatatatttgtatagtggtttcaggatttaaacatcatatttttatgatgaaatctttttatccaaagtcattcttgatttctggatgtttttctatgtacaataggtaaagggctctgtaccaagttctcataagaaacattttattcacttaaggaaattaaaaatccaattaagataaatatttgagagtaaaccttaattttttcctcctattcagatgaattattattagtatttgttacttaaaagtgaagaggtaactagagaaaaatatgtaaatcacttttttatccaacaatcttgtggtcaggaacaaataaggctttagtttactgttaggtaaatttaatattgcaatgaagaggctcagctttaatccagcagacatgaagactttctccataactatggaagacagttatttcattctcagccttatcaaccagtctcaatatcatcccatcttcagatattatttaggattattatctttaaaatcatataatcctaaactttcagagcatgagaataataaaaactgaagctaacagtatacctgttttctttatttttctatcaattatcttgatgttttaaagatgaataagtctataagcattaacactacatttaattcaattttatagaagtactgtcaatgtgaatctaatgggccatttggtaagtcttctctaatccatagcagtagagacattaatcattccttagtcacattgagaatcatctggactgggcatcatgtgctgcataccgtaaatgattattgtcatctgtttagtctgttcatgtagaatgtaaatacattctattagtaaatgtttttgacattaaacactgctgctcactaaggaagaaaattgaaataaatcttatctttaccattatttaaccagtgcttcaaaacctaaataggtgtagatatacagaagatatttgaaataaaaattaacagaaattaatactaaagccatttatactgtgaattaattccttaaaataaatcaatttactacagggttttcaaattttattaaagacaaacatactatattcctaatgcaaaatagttttagagatatcctacattaataaacataaatttatttcatatgcaaagggttcaactttgatccaaatagtacagctatttgacctagagtttttatttgttttcagttattttaatctttctattcagattgatttcttttagctgcaataagtctataattaatggcttctagatggtcatacagatccaaatatatgtttgtataattttagttatagatgtcttaggcaaatatataatcttttgttgaacctagtaagataatccagtcaatatttcaacaaaatatacactgagtgcttactatatcccaggcctacatatgtaatctt

SEQ ID NO: 20 - DNA, 379 bp, Homo sapiens
  modified_base (245)..(364): N = A, C, G or T/U
agctccgaagtnctatcactcatttncagcaaaagttaaaataaattaatgtatacaaggcctcagcccagcgttggcaaattgacgtgttcgataaatgtnagcttttaactactatttcattagtagtagtagtaataaatgtcttctggaaccccagtagccagttatccttgagtaacagtgatttacatctcctgctttctccttttggtgcatttaaaagtcttccctcaatacaacantgacaacacacacacacacacacacacacacacacacacacacacacaatgcaaaactgggcaaagcagatatttctcccacaaatggccaataagcatgnggaagntgctcaacatcnttaggacattagggg

SEQ ID NO: 21 - DNA, 300 bp, Homo sapiens
  modified_base (229)..(244): N = A, C, G or T/U
ccctattgtgaactgtgcatgcaagggacctaggttgtgcactcgttatgagaatgtaactaatgcctgatgatctgagatggaacagtttcatcccaaaaccgtcacacacacacacacacacacacacacacacacacacaggtttgtggaaaagttgtcttccacaaagccaatccaggttggggactactgatatagaaagaaatgtctgatctttaaggcccanagtgattatttntcncttttgttaactgtcttacttgccttaacctccatcaggtttcccacagcacagct

SEQ ID NO: 22 - DNA, 343 bp, Homo sapiens
  modified_base (13): N = A, C, G or T/U
gatcgcaccactncactccagcctgggcaacaaggtgaggctctgtctcactctcacacacacacacacacacacacacacacacacacacacacacacacacaaatatacataacaaacaagaaatgtataaattaaagaaaaagagaaaattttttaaagcacccacaatctagctgtcatgctctggtagttgtcttccagccttgtctctgtgcatagatttataagatttttaaaaatacagtgatattagtgtacttgccatctggtatcctgcttcatttttagagccaacacttttctattgaattagtcttcataaaaacccattttattttat

SEQ ID NO: 23 - DNA, 1743 bp, Mus musculus; identical to SEQ ID NO: 3
  CDS (1)..(1743)

SEQ ID NO: 24 - protein, 580 aa, Mus musculus; identical to SEQ ID NO: 4

SEQ ID NO: 25 - protein, 15 aa, Artificial Sequence
  Description of Artificial Sequence:  Synthetic Peptide
VDSSPEGSGTEDNLQ

SEQ ID NO: 26 - DNA, 33 bp, Artificial Sequence
  Description of Artificial Sequence:  Synthetic Primer
ctggatccaaaatggcctttccatgtaggaagg

SEQ ID NO: 27 - DNA, 35 bp, Artificial Sequence
  Description of Artificial Sequence:  Synthetic Primer
gactcgaggtcacttgtaaagttatcttcagtccc

What is claimed is:

1. An isolated polynucleotide encoding a polypeptide comprising the amino sequence essentially as set forth in SEQ ID NO: 2.

2. The isolated polynucleotide of claim 1, wherein said polynucleotide comprises the nucleic acid sequence essentially as set forth in SEQ ID NO:1.

3. The polynucleotide of claim 2, wherein said polynucleotide is operatively linked to a promoter.

4. The polynucleotide of claim 3, wherein said promoter is a tissue-specific promoter.

5. The polynucleotide of claim 2, further defined as a cDNA segment.

6. The polynucleotide of claim 2, wherein said polynucleotide is comprised in a vector.

7. The polynucleotide of claim 6, wherein said vector is selected from the group consisting of a retroviral vector, an adenoviral vector, and adeno-associated viral vector, a lentivirus vector, a vaccinia viral vector, and a herpesviral vector.

8. The polynucleotide of claim 1, further comprising a pharmaceutically acceptable formulation.

9. A recombinant host cell comprising a DNA segment encoding an isolated human choline transporter.

10. The recombinant host cell of claim 9, wherein said DNA segment encoding a polypeptide having the amino acid sequence essentially as set forth in SEQ ID NO:2.

11. The recombinant host cell of claim 9, wherein said cell is a human cell.

12. A recombinant vector comprising a DNA segment encoding a human choline transporter polypeptide under the control of a promoter.

13. The recombinant vector of claim 12, wherein said vector enhances cholinergic signaling.

14. A purified and isolated polynucleotide wherein the polynucleotide comprises a sequence identical or complementary to between 14 and 100 contiguous nucleotides of SEQ ID NO:1.

15. The polynucleotide of claim 14, wherein said polynucleotide comprises least 20 contiguous nucleotides of SEQ ID NO:1.

16. The polynucleotide of claim 14, wherein said polynucleotide comprises least 30 contiguous nucleotides of SEQ ID NO:1.

17. The polynucleotide of claim 16, wherein said polynucleotide comprises least 100 contiguous nucleotides of SEQ ID NO:1.

18. The polynucleotide of claim 14, wherein said polynucleotide is complementary to at least 20 contiguous nucleotides of SEQ ID NO:1.

19. The polynucleotide of claim 14, wherein said polynucleotide is complementary to at least 30 contiguous nucleotides of SEQ ID NO:1.

20. The polynucleotide of claim 19, wherein said polynucleotide is complementary to at least 50 contiguous nucleotides of SEQ ID NO:1.

21. A purified peptide comprising at least 10 contiguous amino acids of SEQ ID NO:2.

22. The peptide of claim 21, comprising at least 20 contiguous amino acids of SEQ ID NO:2.

23. The peptide of claim 21, comprising at least 50 contiguous amino acids of SEQ ID NO:2.

24. The peptide of claim 21, wherein said peptide is sensitive to hemicholinium-3.

25. The peptide of claim 21, wherein said wherein said peptide is mutated relative to the wild-type hCHT protein.

26. The peptide of claim 25, wherein said peptide modulates high-affinity choline uptake.

27. The peptide of claim 21, wherein said peptide binds to an antibody specific to the polypeptide comprising at least 10 contiguous amino acids of SEQ ID NO:2 encoded by human cDNA.

28. A method of using a DNA segment that encodes an isolated human choline transporter protein, comprising the steps of
(a) preparing a recombinant vector in which a human choline transporter encoding said DNA segment is positioned under the control of a promoter;
(b) introducing said recombinant vector into a host cell;
(c) culturing said host cell under conditions effective to allow expression of the encoded protein or peptide; and
(d) collecting said expressed protein or peptide.

29. An isolated polynucleotide encoding a polypeptide comprising the amino sequence essentially as set forth in SEQ ID NO: 4.

30. The isolated polynucleotide of claim 29, wherein said polynucleotide comprises the nucleic acid sequence essentially as set forth in SEQ ID NO:3.

31. The polynucleotide of claim 30, wherein said polynucleotide is operatively linked to a promoter.

32. The polynucleotide of claim 30, further defined as a cDNA segment.

33. The polynucleotide of claim 30, wherein said polynucleotide is comprised in a vector.

34. A recombinant host cell comprising a DNA segment encoding an isolated choline transporter having the amino acid sequence essentially as set forth in SEQ ID NO:4.

35. A recombinant vector comprising a DNA segment encoding a mouse choline transporter polypeptide under the control of a promoter.

36. A purified and isolated polynucleotide wherein the polynucleotide comprises a sequence identical or complementary to between 10 and 100 contiguous nucleotides of SEQ ID NO:3.

37. A purified peptide comprising at least 10 contiguous amino acids of SEQ ID NO:4.

38. The peptide of claim 37, wherein said peptide binds to an antibody specific to the polypeptide comprising at least 10 contiguous amino acids of SEQ ID NO:4 encoded by mouse cDNA.

39. An antibody that immunologically binds to a protein or peptide encoded by a contiguous sequence from the nucleic acid sequence essentially as set forth in SEQ ID NO:1.

40. An antibody that immunologically binds to a CHT protein or peptide that includes a contiguous amino acid sequence from SEQ ID NO:2.

41. The antibody of claim 40, wherein said antibody is a polyclonal antibody.

42. The antibody of claim 40, wherein said antibody is a monoclonal antibody.

43. The antibody of claim 42, wherein said antibody is operatively attached to a therapeutic agent.

44. The antibody of claim 42, wherein said antibody is operatively attached to a detectable label.

45. The antibody of claim 44, wherein said label is selected from the group consisting of a fluorescent label, a chemiluminescent label, a electroluminescent label, a radiolabel and an enzyme.

46. The antibody of claim 45, wherein said label is a green fluorescent protein.

47. The antibody of claim 45, wherein said label is a β-galactosidase.

48. The antibody of claim 40, wherein said antibody is adapted to detect losses in cholenergic neurons.

49. A method of screening for cholinergic therapeutics comprising:
(a) obtaining a candidate substance;
(b) obtaining a recombinant cell comprising a polynucleotide encoding a choline transporter (CHT) polypeptide and a promoter heterologous to the polypeptide coding region, wherein said promoter directs expression of said CHT polypeptide;
(c) combining candidate substance with said cell; and
(d) determining whether said candidate substance modulates high-affinity choline uptake.

50. The method of claim 49, wherein said CHT is a human choline transporter (hCHT).

51. The method of claim 49, wherein said CHT is a mouse choline transporter (mCHT).

52. The method of claim 49, wherein said cell is a human cell.

53. The method of claim 49, wherein said cell is a mouse cell.

54. The method of claim 49, wherein said cell is an invertebrate cell.

55. The method of claim 49, wherein said cell and said candidate substance are combined in vitro.

56. The method of claim 49, wherein said cell and said candidate substance are combined in vivo.

57. The method of claim 49, wherein said candidate substance is an acetylcholine receptor therapeutic.

58. The method of claim 49, wherein said candidate substance is selected from a small molecule library.

59. The method of claim 49, wherein said candidate substance is an antibody.

60. The method of claim 59, wherein said antibody comprises SEQ ID NO: 25

61. The method of claim 49, wherein said candidate substance is a gene probe

62. The method of claim 49, wherein said candidate substance has low affinity against hCHT.

63. The method of claim 49, wherein determining comprises detecting a label operatively attached to said polypeptide.

64. The method of claim 63, wherein said detectable label is hemicholinium-3.

65. The method of claim 49, wherein said determining comprises Western Blot analysis.

66. The method of claim 49, wherein said determining comprises using a choline transport assay.

67. The method of claim 66, wherein said choline transport assay is a [³H] choline transport assay.

68. The method of claim 66, wherein said choline transport assay further comprises COS-7 cells.

69. The method of claim 49, wherein determining comprises using in situ hybridization, PCR or gene chip analysis.

70. The method of claim 49, wherein determining comprises using a negative screen.

71. The method of claim 49, further comprising using said candidate substance to screen specificity for acetylcholine receptor-directed agents.

72. The method of claim 71, wherein said acetylcholine receptor-directed agents are nicotinic or muscarinic acetylcholine receptor-directed agents.

73. The method of claim 49, further comprising mapping mutations to the hCHT gene.

74. The method of claim 49, further comprising quantitatively evaluating cholinergic gene expression.

75. The method of claim 49, further comprising using said candidate substance to probe human cholinergic neurons.

76 The method of claim 49, further comprising using said candidate substance to identify cholinergic neurons in a postmortem brain.

77. A method of treating a patient comprising:
(a) obtaining a candidate substance;
(b) obtaining a recombinant cell comprising a polynucleotide encoding a choline transporter (CHT) polypeptide and a promoter heterologous to the polypeptide coding region, wherein said promoter directs expression of said CHT polypeptide;
(c) combining candidate substance with said cell;
(d) determining whether said candidate substance modulates high-affinity choline uptake; and
(e) delivering said candidate substance in a therapeutic formulation to a patient.

78. The method of claim 77, further comprising using an antibody to aid in transport of said candidate substance.

79. The method of claim 78, wherein said antibody aids in transport of said candidate substance to the brain of said patient.

80. The method of claim 78, wherein said antibody comprises SEQ ID NO: 25.

81. The method of claim 78, further comprising a probe attached to said antibody.

82. The method of claim 77, further comprising treating a neuromuscular, autonomic or central nervous system disorder of said patient.

83. The method of claim 77, further comprising treating a disease in said patient wherein said disease is Parkinson's disease, Huntington's disease, Alzheimer's, schizophrenia, dysautonomia or myasthenia gravis.

84. The method of claim 77, wherein determining comprises using in situ hybridization, PCR or gene chip analysis.

85. The method of claim 77, wherein determining comprises using a negative screen.

86. The method of claim 77, wherein said cell is contacted in vitro.

87. The method of claim 77, wherein said cell is contacted in vivo.

88. A nucleic acid detection kit comprising, in suitable container means, an isolated human choline transporter nucleic acid segment and a detection reagent.

89. The nucleic acid detection kit of claim 88, wherein the detection reagent is a detectable label that is linked to said nucleic acid segment.

90. The nucleic acid detection kit of claim 88, wherein the detection reagent is hemicholinium-3.

91. The nucleic acid detection kit of claim 88, further comprising a gene chip.

92. The nucleic acid detection kit of claim 88, further comprising an antibody.

93. A transgenic mouse, wherein said mouse lacks at least one functional mouse choline transporter (mCHT) allele.

94. The mouse of claim 93, wherein said mouse lacks two functional mCHT alleles.

95. The mouse of claim 93, wherein said mouse lacks the gene essentially as set forth in SEQ ID NO: 3.

96. A transgenic mouse, wherein the genome of said mouse comprises a choline transporter (CHT) encoding a DNA segment under the control of a heterologous promoter.

97. The mouse of claim 96, wherein said mouse expresses more CHT polypeptides when compared to a non-transgenic littermate.

98. A transgenic mouse, wherein at least one mouse choline transporter (mCHT) allele is operably attacted to a detectable label.

99. The mouse of claim 98, wherein said label is selected from the group consisting of a fluorescent label, a chemiluminescent label, a electroluminescent label, a radiolabel and an enzyme.

100. The mouse of claim 99, wherein said label is a green fluorescent protein.

101. The mouse of claim 99, wherein said label is a β-galactosidase.

102. A method comprising the step of delivering a polynucleotide encoding a choline transporter (CHT) polypeptide to a cell.

103. The method of claim 102, wherein said CHT polypeptide comprising the amino sequence essentially as set forth in SEQ ID NO: 2.

104. The method of claim 102, wherein said method causes an increase in cholinergic function in said cell.

105. The method of claim 104, wherein said cell is in a patient having Parkinson's disease, Huntington's disease, Alzheimer's, schizophrenia, dysautonomia or myasthenia gravis.
